(19) United States
(12) Patent Application Publication
(10) Pub. No.: US 2018/0256644 A1
(43) Pub. Date: Sep. 13, 2018

(54) TUNABLE VARIANT IMMUNOGLOBULIN SUPERFAMILY DOMAINS AND ENGINEERED CELL THERAPY

(71) Applicant: ALPINE IMMUNE SCIENCES, INC., Seattle, WA (US)

(72) Inventors: Ryan SWANSON, Seattle, WA (US); Michael KORNACKER, Seattle, WA (US)

(73) Assignee: ALPINE IMMUNE SCIENCES, INC., Seattle, WA (US)

(21) Appl. No.: 15/759,812

(22) PCT Filed: Sep. 14, 2016
(86) PCT No.: PCT/US2016/051786

§ 371 Date: Mar. 13, 2018

Related U.S. Application Data
(60) Provisional application No. 62/218,531, filed on Sep. 14, 2015.
(60) Provisional application No. 62/323,608, filed on Apr. 15, 2016.
(60) Provisional application No. 62/323,595, filed on Apr. 15, 2016.
(60) Provisional application No. 62/367,822, filed on Jul. 28, 2016.
(60) Provisional application No. 62/367,819, filed on Jul. 28, 2016.

(51) Int. Cl. A61K 35/17; A61K 39/00; C12N 5/0783; C12N 5/0781; C07K 19/00; C07K 14/705; A61K 38/17

(52) U.S. Cl. CPC A61K 35/17; A61K 39/0011; C12N 5/0638; A61P 37/00; C07K 19/00; C07K 14/70517; A61K 38/1774; C12N 5/0635

(57) ABSTRACT

Provided are transmembrane immunomodulatory proteins, nucleic acids encoding such proteins and cells engineered with the proteins. The transmembrane immunomodulatory proteins and engineered cells provide therapeutic utility for a variety of immunological and oncological conditions. Compositions and methods for making and using such proteins are provided.

### CROSS-REFERENCE TO RELATED APPLICATIONS

[0001] This application claims priority from U.S. provisional application No. 62/218,531 filed Sep. 14, 2015, entitled “Tunable Variant Immunoglobulin Superfamily Domains and Engineered Cell Therapy,” U.S. provisional application No. 62/323,608 filed Apr. 15, 2016, entitled “ICOS Ligand Variant Immunomodulatory Proteins and Uses Thereof,” to U.S. provisional application No. 62/323,595 filed Apr. 15, 2016, entitled “CD80 Variant Immunomodulatory Proteins and Uses Thereof,” U.S. provisional application No. 62/367,822 filed Jul. 28, 2016, entitled “CD155 Variant Immunomodulatory Proteins and Uses Thereof,” and U.S. provisional application No. 62/367,819 filed Jul. 28, 2016, entitled “CD112 Variant Immunomodulatory Proteins and Uses Thereof,” the contents of each of which are incorporated by reference in their entirety.

### INCORPORATION BY REFERENCE OF SEQUENCE LISTING

[0002] The present application is being filed along with a Sequence Listing in electronic format. The Sequence Listing is provided as a file entitled 761612000240SeqList.TXT, created Sep. 10, 2016 which is 750,987 bytes in size. The information in the electronic format of the Sequence Listing is incorporated by reference in its entirety.

### FIELD

[0003] The present invention relates to transmembrane immunomodulatory proteins (TIPs) and immune cells engineered to express such immunomodulatory proteins for modulating immune response in the treatment of cancer and immunological diseases.

### BACKGROUND

[0004] Modulation of the immune response by intervening in the processes that occur in the immunological synapse (IS) formed by and between antigen-presenting cells (APCs) or target cells and lymphocytes is of increasing medical interest. Currently, biologics used to enhance or suppress immune responses have generally been limited to immunoglobulins (e.g., anti-PD-1 mAbs) or soluble receptors (e.g., Fc-CTLA4). Soluble receptors suffer from a number of deficiencies. While useful for antagonizing interactions between proteins, soluble receptors often lack the ability to agonize such interactions. Antibodies have proven less limited in this regard and examples of both agonistic and antagonistic antibodies are known in the art. Nevertheless, both soluble receptors and antibodies lack important attributes that are critical to function in the IS. Mechanistically, cell surface proteins in the IS can involve the coordinated and often simultaneous interaction of multiple protein targets with a single protein to which they bind. IS interactions occur in close association with the junction of two cells, and a single protein in this structure can interact with both a protein on the same cell (cis) as well as a protein on the associated cell (trans), likely at the same time. Thus, there is a need for improved molecules for modulation of immune responses. Provided are embodiments that meet such needs.

### SUMMARY

[0005] Provided herein are transmembrane immunomodulatory proteins (TIP) containing (1) an ectodomain comprising at least one non-immunoglobulin affinity-modified immunoglobulin superfamily (IgSF) domain containing one or more amino acid substitution(s) in a wild-type IgSF domain, wherein the at least one affinity-modified IgSF domain specifically binds at least one cell surface cognate binding partner of the wild-type IgSF domain and (2) a transmembrane domain.

[0006] In some of any such embodiments, the at least one cell surface cognate binding partner is expressed on a mammalian cell. In some of any such embodiments, the mammalian cell is an antigen presenting cell (APC), a tumor cell, or a lymphocyte. In some embodiments, the lymphocyte is a T-cell. In some of any such embodiments, the mammalian cell is a mouse, rat, cynomolgus monkey, or human cell.

[0007] In some of any such embodiments, the at least one affinity modified IgSF domain has increased binding affinity to the at least one cell surface cognate binding partner compared with the reference wild-type IgSF domain. In some of any such embodiments, specific binding of the transmembrane immunomodulatory protein containing the at least one affinity-modified IgSF domain modulates immunological activity of the mammalian cell compared with the reference transmembrane domain containing the wild-type IgSF domain. In some of any such embodiments, specific binding of the transmembrane immunomodulatory protein containing the at least one affinity-modified IgSF domain increases immunological activity of the mammalian cell compared with the reference transmembrane domain containing the wild-type IgSF domain. In some of any such embodiments, specific binding of the transmembrane immunomodulatory protein attenuates immunological activity of the mammalian cell compared with the reference transmembrane domain containing the wild-type IgSF domain.

[0008] In some of any such embodiments, the wild-type IgSF domain is from an IgSF family member of a family selected from Signal-Regulatory Protein (SIRP) Family, Triggering Receptor Expressed On Myeloid Cells Like (TREML) Family, Carcinoembryonic Antigen-related Cell Adhesion Molecule (CEACAM) Family, Sialic Acid Binding Ig-Like Lectin (SIGLEC) Family, Butyrophilin Family, B7 family, CD28 family, V-set and Immunoglobulin Domain Containing (VSIG) family, V-set transmembrane Domain (VSTM) family, Major Histocompatibility Complex (MHC) family, Signaling lymphocytic activation molecule (SLAM) family, Leukocyte immunoglobulin-like receptor (LIR), Nectin (Nec) family, Nectin-like (NECL) family, Poliovirus receptor related (PVR) family, Natural cytotoxicity triggering receptor (NCR) family, T cell immunoglobulin and mucin (TIM) family or Killer-cell immunoglobulin-like receptors (KIR) family. In some of any such embodiments, the wild-type IgSF domain is from an IgSF member selected from CD80, CD86, PD-L1, PD-L2, ICOS Ligand, B7-H3, B7-H4, CD28, CTLA4, PD-1, ICOS, BTLA, CD4, CD8-alpha, CD8-beta, LAG3, TIM-3, CEACAM1, TIGIT, PVR, PVRL2, CD226, CD2, CD160, CD200, CD200R or Nkp30. In some of any such embodiments, the wild-type IgSF domain is a human IgSF member.

[0009] In some of any such embodiments, the at least one affinity modified IgSF domain has at least 90% sequence identity to a wild-type IgSF domain or a specific binding fragment thereof contained in the sequence of amino acids set forth in any of SEQ ID NOS: 1-54. In some of any such embodiments, the transmembrane immunomodulatory protein has at least 90% sequence identity to the amino acid sequence selected from any of SEQ ID NOS: 393-419.

[0010] In some of any such embodiments, the at least one cell surface cognate binding partner is a stimulatory receptor expressed on a T-cell and the at least one affinity-modified IgSF domain has increased binding affinity to the stimulatory receptor compared to the affinity of the wild-type IgSF domain. In some embodiments, binding of the affinity-modified IgSF domain to the stimulatory receptor increases immunological activity of the T-cell.

[0011] In some of any such embodiments, provided is a transmembrane immunomodulatory protein (TIP) comprising: an ectodomain, wherein the ectodomain comprises at least one non-immunoglobulin affinity-modified immunoglobulin superfamily (IgSF) domain; and a transmembrane domain, wherein: the TIP is expressed on a first T-cell; the affinity-modified IgSF domain specifically binds at least one counter-structure expressed on a mammalian cell; the mammalian cell is an antigen presenting cell (APC), a tumor cell, or a second T-cell; and specific binding of the affinity-modified IgSF domain to a counter-structure modulates immunological activity of the mammalian cell. In some embodiments, the TIP comprises a first affinity-modified IgSF domain, wherein the counter-structure expressed on the mammalian cell is a stimulatory counter-structure expressed on the second T-cell; and the first affinity-modified IgSF domain specifically binds to the stimulatory counter-structure and increases immunomodulatory activity of the second T-cell.

[0012] In some cases, the stimulatory receptor is CD28, ICOS or CD226. In some of any such embodiments, the at least one affinity-modified IgSF domain is an affinity modified B7-1 IgSF domain and the stimulatory receptor is CD28. In some of any such embodiments, the at least one affinity-modified IgSF domain is an affinity modified ICOSL IgSF domain and the stimulatory receptor is ICOS. In some of any such embodiments, the affinity-modified IgSF domain is an affinity modified ICOSL IgSF domain and the stimulatory receptor is CD28. In some of any such embodiments, the at least one affinity-modified IgSF domain is an affinity-modified ICOSL IgSF domain that has increased binding affinity to at least one of: ICOS and CD28. In some of any such embodiments, the affinity modified IgSF domain is an affinity modified ICOSL IgV IgSF domain with increased binding affinity to both ICOS and CD28. In some of any such embodiments, the affinity-modified IgSF domain does not substantially specifically bind to CTLA-4 or exhibits decreased binding affinity to CTLA-4 compared to the wild-type IgSF domain.

[0013] In some of any such embodiments, the at least one affinity-modified IgSF domain specifically binds to no more than one cell surface cognate binding partner. In some of any such embodiments, the transmembrane immunomodulatory protein specifically binds to no more than one cell surface cognate binding partner. In some of any such embodiments, the at least one affinity-modified domain specifically binds to at least two cell surface cognate binding partners.

[0014] In some of any such embodiments, the first cell surface cognate binding partner is a stimulatory receptor expressed on a T cell; and the second cell surface cognate binding partner is an inhibitory ligand of an inhibitory receptor, wherein the inhibitory receptor is expressed on a T-cell.

[0015] In some of any such embodiments, binding of the affinity-modified domain to the inhibitory ligand competitively inhibits binding of the inhibitory ligand to the inhibitory receptor. In some embodiments, the inhibitory receptor is PD-1, CTLA-4, LAG-3, TIGIT, CD96, CD112R, BTLA, CD160 or TIM-3; or the ligand of the inhibitory receptor is PD-L1, PD-L2, B7-1, B7-2, HVEM, MHC class II, PVR, CEACAM-1 or GAL9. In some of any such embodiments, the affinity modified IgSF domain is an affinity modified B7-1 domain and the stimulatory receptor is CD28. In some of any such embodiments, the inhibitory ligand is PD-L1 and the inhibitory receptor is PD-1.

[0016] In some of any such embodiments, the affinity-modified IgSF domain exhibits decreased binding affinity to CTLA-4 compared to the wild-type IgSF domain for CTLA-4. In some of any such embodiments, the affinity-modified IgSF domain does not substantially specifically bind to CTLA-4. In some of any such embodiments, the affinity modified IgSF domain is an affinity modified CD155 IgSF domain or an affinity modified CD112 IgSF domain and the stimulatory receptor is CD226. In some of any such embodiments, the affinity-modified IgSF domain exhibits decreased binding affinity to TIGIT (T-cell immunoreceptor with Ig and ITIM domains) compared to the affinity of the wild-type IgSF domain.

[0017] In some of any such embodiments, the at least one affinity-modified IgSF domain specifically binds to a cell surface cognate binding partner that is a tumor specific antigen. In some embodiments, the tumor specific antigen is B7-H6.

[0018] In some of any such embodiments, the affinity-modified IgSF domain is an affinity modified Nkp30 IgSF domain. In some of any such embodiments, the at least one affinity-modified IgSF domain is a first affinity-modified IgSF domain and the ectodomain contains a second affinity-modified IgSF domain. In some embodiments, the first and second affinity-modified IgSF domain are different. In some of any such embodiments, the first affinity-modified IgSF domain and the second affinity-modified IgSF domain each contain one or more amino acid different substitutions in the same wild-type IgSF domain. In some of any such embodiments, the first affinity-modified IgSF domain and the second affinity-modified IgSF domain each contain one or more amino acid substitutions in a different wild-type IgSF domain.

[0019] In some of any such embodiments, the transmembrane immunomodulatory protein further contains an endodomain or cytoplasmic signaling domains. In some embodiments, the endodomain is the endodomain from the wild-type IgSF member containing the wild-type IgSF domain or is a functionally active portion thereof. In some embodiments, the transmembrane immunomodulatory protein is a chimeric receptor, wherein the endodomain is not the endodomain from the wild-type IgSF member containing the wild-type IgSF domain. In some of any such embodiments, the endodomain contains at least one ITAM (immunoreceptor tyrosine-based activation motif)-containing signaling domain. In some of any such embodiments, the endodomain contains a CD3-zeta signaling domain. In some of any such embodiments, the endodomain further contains at least one of: a CD28 costimulatory domain, an ICOS signaling domain, an OX40 signaling domain, and a 41BB signaling domain.

[0020] In some of any such embodiments, the wild-type IgSF domain is from an IgSF member that is an inhibitory receptor containing an ITIM signaling domain. In some embodiments, the inhibitory receptor is PD-1, CTLA-4, LAG3, TIGIT, TIM-3, or BTLA and the at least one affinity-modified IgSF domain is an affinity-modified IgSF domain of PD-1, CTLA-4, LAG3, TIGIT, TIM-3, or BTLA, respectively. In some of any such embodiments, the inhibitory receptor is PD-1 and the at least one affinity-modified IgSF domain is an affinity-modified IgSF of PD-1. In some of any such embodiments, the affinity-modified IgSF domain has increased binding affinity for a trans surface cognate binding partner compared to the wildtype IgSF domain, whereby the increased binding affinity competitively inhibits binding of the trans surface cognate binding partner to the inhibitory receptor.

[0021] In some of any such embodiments, the transmembrane immunomodulatory protein does not contain an endodomain, ITIM or cytoplasmic signaling domains.

[0022] In some of any such embodiments, the affinity modified IgSF domain differs by no more than ten amino acid substitutions from the wildtype IgSF domain. In some of any such embodiments, the affinity modified IgSF domain differs by no more than five amino acid substitutions from the wildtype IgSF domain.

[0023] In some of any such embodiments, the affinity-modified IgSF domain is or contains an affinity modified IgV domain, affinity modified IgC1 domain or an affinity modified IgC2 domain or is a specific binding fragment thereof containing the one or more amino acid substitutions. In some of any such embodiments, the ectodomain further contains one or more non-affinity modified IgSF domains.

[0024] In some of any such embodiments, the one or more non-affinity modified IgSF domains is from a wild-type IgSF member containing the wild-type IgSF domain. In some of any such embodiments, the transmembrane domain is the native transmembrane domain from the corresponding wild-type IgSF member. In some of any such embodiments, the transmembrane domain is not the native transmembrane domain from the corresponding wild-type IgSF member. In some embodiments, the transmembrane protein is a transmembrane protein derived from CD8.

[0025] In another aspect, the present invention relates to a recombinant nucleic acid encoding any of the transmembrane immunomodulatory proteins summarized above.

[0026] In another aspect, the present invention relates to a recombinant expression vector containing any of the nucleic acids summarized above.

[0027] In another aspect, the present invention relates to a recombinant expression vector containing a nucleic acid encoding any of the transmembrane immunomodulatory proteins summarized above.

[0028] In another aspect, the present invention relates to a recombinant host cell containing any of the expression vectors summarized above.

[0029] In another aspect, the present invention relates to a recombinant host cell containing a nucleic acid described above. In some of any such embodiments, the host cell is a mammalian host cell. In some of any such embodiments, the mammalian host cell is a human host cell.

[0030] In another aspect, the present invention relates to an engineered cell containing any of the transmembrane immunomodulatory proteins described above. In some of any such embodiments, the cell is an immune cell. In some of any such embodiments, the cell is a lymphocyte. In some embodiments, the lymphocyte is a T cell, a B cell or an NK cell. In some of any such embodiments, the cell is a T cell. In some of any such embodiments, the T cells is CD4+ or CD8+. In some of any such embodiments, the cell is an antigen presenting cell.

[0031] In some of any such embodiments, the engineered cell further contains a chimeric antigen receptor (CAR) or an engineered T-cell receptor (TCR).

[0032] In another aspect, the present invention relates to a pharmaceutical composition containing any of the cells described above and a pharmaceutically acceptable carrier. In some embodiments, the pharmaceutical composition is sterile.

[0033] In some embodiments, provided herein is a method of modulating an immune response in a mammalian subject, involving administering a cell according to any one of the embodiments described above or a pharmaceutical composition according to any one of the embodiments described above to the subject. In some of any such embodiments, modulating the immune response treats a disease or disorder in the subject. In some of any such embodiments, the modulated immune response is increased. In some embodiments, the disease or disorder is a tumor. In some of any such embodiments, the disease or disorder is a cancer. In some of any such embodiments, the disease or disorder is melanoma, lung cancer, bladder cancer, or a hematological malignancy.

[0034] In some of any such embodiments, the modulated immune response is decreased. In some of any such embodiments, the disease or disorder is an inflammatory disease or condition. In some of any such embodiments, the disease or condition is Crohn's disease, ulcerative colitis, multiple sclerosis, asthma, rheumatoid arthritis, or psoriasis.

[0035] In some of any such embodiments, the subject is human. In some of any such embodiments, the cell is autologous to the subject. In some of any such embodiments, the cell is allogenic to the subject.

### BRIEF DESCRIPTION OF THE DRAWINGS

[0036] FIG. 1A depicts results of a competition binding assay for binding of biotinylated recombinant CD28 Fc fusion protein (rCD28.Fc) to immobilized CD80 variant A91G ECD-Fc fusion molecule in the presence of unlabeled recombinant human PD-L1-his, human CTLA-4-his or human-PD-L2-Fc fusion protein.

[0037] FIG. 1B depicts results of a competition binding assay for binding of biotinylated recombinant human PD-L1-his monomeric protein to immobilized CD80 variant A91G ECD-Fc fusion molecule in the presence of unlabeled recombinant human rCD28.Fc, human CTLA-4.Fc or human PD-L2.Fc

[0038] FIG. 2 depicts impedance results reflecting cytotoxic killing activity of cells engineered with an anti-CD19 chimeric antigen receptor (CAR) alone or with an exemplary transmembrane immunomodulatory TIP (CD80-TIP or ICOSL-TIP) or the corresponding CD80 or ICOSL wild-type transmembrane protein following co-culture with target antigen-expressing cells. Impedance was assessed using the Acea Real-Time Cell Analyzer (RTCA), which measures the impedance variations in the culture media of a 96-well microelectronic plate (E-plate).

### DETAILED DESCRIPTION

[0039] Provided herein are transmembrane immunomodulatory proteins (TIPs) and cells, such as immune cells, engineered to express such TIPs. In some embodiments, the TIP contains an extracellular ligand binding domain that contains an affinity-modified IgSF domain and that is capable of binding to one or more protein ligands, and generally two or more protein ligands. In some embodiments, the protein ligands are cell surface proteins expressed by immune cells that engage with one or more other immune receptor, e.g. on lymphocytes, to induce inhibitory or activating signals. For example, the interaction of certain receptors on lymphocytes with their cognate cell surface ligands to form an immunological synapse (IS) between antigen-presenting cells (APCs) or target cells and lymphocytes can provide costimulatory or inhibitory signals that can regulate the immune system. In some aspects, TIP-engineered cells expressing a TIP provided herein can alter the interaction of cell surface protein ligands with their receptors to thereby modulate immune cells, such as T cell, activity. In some embodiments, the binding of the TIP to a ligand or ligands modulates, e.g. induces, enhances or suppresses, immunological immune responses of the immune cell in which it is expressed or a cell to which the TIP expressed on the cell specifically binds.

[0040] In some embodiments, under normal physiological conditions, the T cell-mediated immune response is initiated by antigen recognition by the T cell receptor (TCR) and is regulated by a balance of co-stimulatory and inhibitory signals (i.e., immune checkpoint proteins). The immune system relies on immune checkpoints to prevent autoimmunity (i.e., self-tolerance) and to protect tissues from excessive damage during an immune response, for example during an attack against a pathogenic infection. In some cases, however, these immunomodulatory proteins can be dysregulated in diseases and conditions, including tumors, as a mechanism for evading the immune system.

[0041] Thus, in some aspects, immunotherapy that alters immune cell activity, such as T cell activity, can treat certain diseases and conditions in which the immune response is dysregulated. Therapeutic approaches that seek to modulate interactions in the IS would benefit from the ability to bind multiple IS targets simultaneously and in a manner that is sensitive to temporal sequence and spatial orientation. Current therapeutic approaches fall short of this goal. Instead, soluble receptors and antibodies typically bind no more than a single target protein at a time. This may be due to the absence of more than a single target species. Additionally, wild-type receptors and ligands possess low affinities for cognate binding partners, which preclude their use as soluble therapeutics.

[0042] Less trivially, however, soluble receptors and antibodies generally bind competitively (e.g., to no more than one target species at a time) and therefore lack the ability to simultaneously bind multiple targets. And while bispecific antibodies, as well as modalities comprising dual antigen binding regions, can bind to more than one target molecule simultaneously, the three-dimensional configuration typical of these modalities often precludes them intervening in key processes occurring in the IS in a manner consistent with their temporal and spatial requirements.

[0043] What is needed is an entirely new class of therapeutic molecules that have the specificity and affinity of antibodies or soluble receptors but, in addition, maintain the size, volume, and spatial orientation constraints required in the IS. Further, such therapeutics would have the ability to bind to their targets non-competitively as well as competitively. A molecule with these properties would therefore have novel function in the ability to integrate into multi-protein complexes at IS and generate the desired binding configuration and resulting biological activity.

[0044] To this end, emerging immuno-oncology therapeutic regimes need to safely break tumor-induced T cell tolerance. Current state-of-the-art immuno-therapeutics block PD-1 or CTLA4, central inhibitory molecules of the B7/CD28 family that are known to limit T cell effector function. While antagonistic antibodies against such single targets function to disrupt immune synapse checkpoint signaling complexes, they fall short of simultaneously activating T cells. Conversely, bispecific antibody approaches activate T cells, but fall short of simultaneously blocking inhibitory ligands that regulate the induced signal.

[0045] To address these shortcomings, provided are immunotherapies, such as cell therapies, that can modulate immune cell activities. In some embodiments, the provided immunotherapies can enhance immune cells signaling, such as T-cell activation signaling, and/or can block inhibitory regulation, which, in some cases, can occur simultaneously. In some embodiments, the provided immunotherapies relate to immunoglobulin superfamily (IgSF) components of the immune synapse that are known to have a dual role in both T-cell activation and blocking of inhibitory ligands. In some aspects, IgSF based-cell therapies engineered from immune system ligands, such as human immune system ligands themselves are more likely to retain their ability to normally assemble into key pathways of the immune synapse and maintain normal interactions and regulatory functions in ways that antibodies or next-generation bi-specific reagents cannot. This is due to the relatively large size of antibodies as well as from the fact they are not natural components of the immune synapse. These unique features of human immune system ligands, and cells engineered to express affinity-modified variants of such ligands, promise to provide a new level of immunotherapeutic efficacy and safety. In particular aspects, the provided TIP-engineered cells provide an immunotherapy platform using affinity modified native immune ligands to generate immunotherapy biologics that bind with tunable affinities to one or more of their cognate immune receptors in the treatment of a variety of oncological and immunological indications.

[0046] All publications, including patents, patent applications scientific articles and databases, mentioned in this specification are herein incorporated by reference in their entirety for all purposes to the same extent as if each individual publication, including patent, patent application, scientific article or database, were specifically and individually indicated to be incorporated by reference. If a definition set forth herein is contrary to or otherwise inconsistent with a definition set forth in the patents, applications, published applications and other publications that are herein incorporated by reference, the definition set forth herein prevails over the definition that is incorporated herein by reference.

[0047] The section headings used herein are for organizational purposes only and are not to be construed as limiting the subject matter described.

### I. DEFINITIONS

[0048] Unless defined otherwise, all terms of art, notations and other technical and scientific terms or terminology used herein are intended to have the same meaning as is commonly understood by one of ordinary skill in the art to which the claimed subject matter pertains. In some cases, terms with commonly understood meanings are defined herein for clarity and/or for ready reference, and the inclusion of such definitions herein should not necessarily be construed to represent a substantial difference over what is generally understood in the art.

[0049] The terms used throughout this specification are defined as follows unless otherwise limited in specific instances. As used in the specification and the appended claims, the singular forms “a,” “an,” and “the” include plural referents unless the context clearly dictates otherwise. Unless defined otherwise, all technical and scientific terms, acronyms, and abbreviations used herein have the same meaning as commonly understood by one of ordinary skill in the art to which the invention pertains. Unless indicated otherwise, abbreviations and symbols for chemical and biochemical names is per IUPAC-IUB nomenclature. Unless indicated otherwise, all numerical ranges are inclusive of the values defining the range as well as all integer values in-between.

[0050] The term “affinity modified” as used in the context of an immunoglobulin superfamily domain, means a mammalian immunoglobulin superfamily (IgSF) domain having an altered amino acid sequence (relative to the corresponding wild-type parental or unmodified IgSF domain) such that it has an increased or decreased binding affinity or avidity to at least one of its cognate binding partners (alternatively “counter-structures”) compared to the parental wild-type or unmodified (i.e., non-affinity modified) IgSF control domain. In some embodiments, the affinity-modified IgSF domain can contain 1, 2, 3, 4, 5, 6, 7, 8, 9, 10, 11, 12, 13, 14, 15, 16, 17, 18, 19, 20, 21, 22, 23, 24, 25, 26, 27, 28, 29, 30 or more amino acid differences, such as amino acid substitutions, in a wildtype or unmodified IgSF domain. An increase or decrease in binding affinity or avidity can be determined using well known binding assays such as flow cytometry. Larsen et al., American Journal of Transplantation, Vol 5: 443-453 (2005). See also, Linsley et al., Immunity, 1: 7930801 (1994). An increase in a protein's binding affinity or avidity to its cognate binding partner(s) is to a value at least 10% greater than that of the wild-type IgSF domain control and in some embodiments, at least 20%, 30%, 40%, 50%, 100%, 200%, 300%, 500%, 1000%, 5000%, or 10000% greater than that of the wild-type IgSF domain control value. A decrease in a protein's binding affinity or avidity to at least one of its cognate binding partner is to a value no greater than 90% of the control but no less than 10% of the wild-type IgSF domain control value, and in some embodiments no greater than 80%, 70% 60%, 50%, 40%, 30%, or 20% but no less than 10% of the wild-type IgSF domain control value. An affinity-modified protein is altered in primary amino acid sequence by substitution, addition, or deletion of amino acid residues. The term “affinity modified IgSF domain” is not be construed as imposing any condition for any particular starting composition or method by which the affinity-modified IgSF domain was created. Thus, the affinity modified IgSF domains of the present invention are not limited to wild type IgSF domains that are then transformed to an affinity modified IgSF domain by any particular process of affinity modification. An affinity modified IgSF domain polypeptide can, for example, be generated starting from wild type mammalian IgSF domain sequence information, then modeled in silico for binding to its cognate binding partner, and finally recombinantly or chemically synthesized to yield the affinity modified IgSF domain composition of matter. In but one alternative example, an affinity modified IgSF domain can be created by site-directed mutagenesis of a wild-type IgSF domain. Thus, affinity modified IgSF domain denotes a product and not necessarily a product produced by any given process. A variety of techniques including recombinant methods, chemical synthesis, or combinations thereof, may be employed.

[0051] The term “allogeneic” as used herein means a cell or tissue that is removed from one organism and then infused or adoptively transferred into a genetically dissimilar organism of the same species.

[0052] The term “autologous” as used herein means a cell or tissue that is removed from the same organism to which it is later infused or adoptively transferred. An autologous cell or tissue can be altered by, for example, recombinant DNA methodologies, such that it is no longer genetically identical to the native cell or native tissue which is removed from the organism. For example, a native autologous T-cell can be genetically engineered by recombinant DNA techniques to become an autologous engineered cell expressing a transmembrane immunomodulatory protein and/or chimeric antigen receptor (CAR), which in some cases involves engineering a T-cell or TIL (tumor infiltrating lymphocyte). The engineered cell can then be infused into a patient from which the native T-cell was isolated. In some embodiments, the organism is human or murine.

[0053] The terms “binding affinity,” and “binding avidity” as used herein means the specific binding affinity and specific binding avidity, respectively, of a protein for its cognate binding partner (i.e., its counter-structure) under specific binding conditions. In biochemical kinetics avidity refers to the accumulated strength of multiple affinities of individual non-covalent binding interactions, such as between an IgSF domain and its cognate binding partner (i.e., its counter-structure). As such, avidity is distinct from affinity, which describes the strength of a single interaction. An increase or attenuation in binding affinity of an affinity modified IgSF domain to its counter-structure is determined relative to the binding affinity of the unmodified IgSF domain (e.g., the native or wild-type IgSF domain). Methods for determining binding affinity or avidity are known in art. See, for example, Larsen et al., American Journal of Transplantation, Vol 5: 443-453 (2005).

[0054] The term “cell surface counter-structure” (alternatively “cognate cell surface binding partner”) as used herein is a counter-structure (alternatively is a cognate binding partner) expressed on a mammalian cell. Typically, the cell surface counter-structure is a transmembrane protein. In some embodiments, the cell surface counter-structure is a receptor.

[0055] The term “chimeric antigen receptor” or “CAR” as used herein refers to an artificial (i.e., man-made) transmembrane protein expressed on a mammalian cell comprising at least an ectodomain, a transmembrane, and an endodomain. Optionally, the CAR protein includes a “spacer” which covalently links the ectodomain to the transmembrane domain. A spacer is often a polypeptide linking the ectodomain to the transmembrane domain via peptide bonds. The CAR is typically expressed on a mammalian lymphocyte. In some embodiments, the CAR is expressed on a mammalian cell such as a T-cell or a tumor infiltrating lymphocyte (TIL). A CAR expressed on a T-cell is referred to herein as a CAR T-cell or “CAR-T.” In some embodiments the CAR-T is a T helper cell, a cytotoxic T-cell, a natural killer T-cell, a memory T-cell, a regulatory T-cell, or a gamma delta T-cell. When used clinically in, e.g. adoptive cell transfer, a CAR with antigen binding specificity to the patient's tumor is typically engineered to be expressed on a native lymphocyte obtained from the patient. The engineered lymphocyte expressing the CAR is then infused back into the patient. The lymphocyte is thus often an autologous T-cell although allogeneic T-cells are included within the scope of the invention. The ectodomain of a CAR comprises an antigen binding region, such as an antibody or antigen binding fragment thereof (e.g. scFv), that specifically binds under physiological conditions with an antigen, such as a tumor specific antigen. Upon specific binding a biochemical chain of events (i.e., signal transduction) results in modulation of the immunological activity of the cell on which the CAR is expressed. Thus, for example, upon specific binding by the antigen binding region of the CAR-T to its antigen can lead to changes in the immunological activity of the T-cell activity as reflected by changes in cytotoxicity, proliferation or cytokine production. Signal transduction upon CAR activation is achieved in some embodiments by the CD3-zeta chain (“CD3-z”) which is involved in signal transduction in native mammalian T-cells. CARs can further comprise multiple signaling domains such as CD28, ICOS, 41BB or OX40, to further modulate immunomodulatory response of the T-cell. CD3-z comprises a conserved motif known as an immunoreceptor tyrosine-based activation motif (ITAM) which is involved in T-cell receptor signal transduction.

[0056] The terms “cognate binding partner” or “counter-structure” in reference to a protein, such as an IgSF domain or an affinity modified IgSF domain, refers to at least one molecule (typically a native mammalian protein) to which the referenced protein specifically binds under specific binding conditions. In some aspects, an affinity modified IgSF domain specifically binds to the counter-structure of the corresponding native or wildtype IgSF domain but with increased or attenuated affinity. A species of ligand recognized and specifically binding to its cognate receptor under specific binding conditions is an example of a counter-structure or cognate binding partner of that receptor. A receptor, to which a native ligand recognizes and specifically binds to under specific binding conditions, is an example of a counter-structure of that ligand. In turn, the native ligand is the counter-structure of the receptor. For example, ICOSL specifically binds to CD28 and ICOS and thus these proteins are counter-structures of ICOSL. In another example, a tumor specific antigen and an affinity modified IgSF domain to which it specifically binds, are each counter-structures of the other. In the present invention a “cell surface molecular species” is a cognate binding partner of ligands of the immunological synapse (IS), expressed on and by cells, such as mammalian cells, forming the immunological synapse, for example immune cells.

[0057] The term “competitive binding” as used herein means that a protein is capable of specifically binding to at least two cognate binding partners but that specific binding of one cognate binding partner inhibits, such as prevents or precludes, simultaneous binding of the second cognate binding partner. Thus, in some cases, it is not possible for a protein to bind the two cognate binding partners at the same time. Generally, competitive binders contain the same or overlapping binding site for binding but this is not a requirement. In some embodiments, competitive binding causes a measurable inhibition (partial or complete) of specific binding of a protein to one of its cognate binding partner due to specific binding of a second cognate binding partner. A variety of methods are known to quantify competitive binding such as ELISA (enzyme linked immunosorbent assay) or Forte-Bio Octet experimental systems.

[0058] The term “conservative amino acid substitution” as used herein means an amino acid substitution in which an amino acid residue is substituted by another amino acid residue having a side chain R group with similar chemical properties (e.g., charge or hydrophobicity). Examples of groups of amino acids that have side chains with similar chemical properties include 1) aliphatic side chains: glycine, alanine, valine, leucine, and isoleucine; 2) aliphatic-hydroxyl side chains: serine and threonine; 3) amide-containing side chains: asparagine and glutamine; 4) aromatic side chains: phenylalanine, tyrosine, and tryptophan; 5) basic side chains: lysine, arginine, and histidine; 6) acidic side chains: aspartic acid and glutamic acid; and 7) sulfur-containing side chains: cysteine and methionine. Conservative amino acids substitution groups are: valine-leucine-isoleucine, phenylalanine-tyrosine, lysine-arginine, alanine-valine, glutamate-aspartate, and asparagine-glutamine.

[0059] The term, “corresponding to” with reference to positions of a protein, such as recitation that nucleotides or amino acid positions “correspond to” nucleotides or amino acid positions in a disclosed sequence, such as set forth in the Sequence listing, refers to nucleotides or amino acid positions identified upon alignment with the disclosed sequence based on structural sequence alignment or using a standard alignment algorithm, such as the GAP algorithm. By aligning the sequences, one skilled in the art can identify corresponding residues, for example, using conserved and identical amino acid residues as guides.

[0060] The term “cytokine” includes, e.g., but is not limited to, interleukins, interferons (IFN), chemokines, hematopoietic growth factors, tumor necrosis factors (TNF), and transforming growth factors. In general, these are small molecular weight proteins that regulate maturation, activation, proliferation, and differentiation of cells of the immune system.

[0061] The terms “derivatives” or “derivatized” refer to modification of an immunomodulatory protein by covalently linking it, directly or indirectly, so as to alter such characteristics as half-life, bioavailability, immunogenicity, solubility, toxicity, potency, or efficacy while retaining or enhancing its therapeutic benefit. Derivatives can be made by glycosylation, pegylation, lipidation, or Fc-fusion.

[0062] As used herein, “domain” (typically a sequence of three or more, generally 5 or 7 or more amino acids, such as 10 to 200 amino acid residues) refers to a portion of a molecule, such as a protein or encoding nucleic acid, that is structurally and/or functionally distinct from other portions of the molecule and is identifiable. For example, domains include those portions of a polypeptide chain that can form an independently folded structure within a protein made up of one or more structural motifs and/or that is recognized by virtue of a functional activity, such as binding activity. A protein can have one, or more than one, distinct domains. For example, a domain can be identified, defined or distinguished by homology of the primary sequence or structure to related family members, such as homology to motifs. In another example, a domain can be distinguished by its function, such as an ability to interact with a biomolecule, such as a cognate binding partner. A domain independently can exhibit a biological function or activity such that the domain independently or fused to another molecule can perform an activity, such as, for example binding. A domain can be a linear sequence of amino acids or a non-linear sequence of amino acids. Many polypeptides contain a plurality of domains. Such domains are known, and can be identified by those of skill in the art. For exemplification herein, definitions are provided, but it is understood that it is well within the skill in the art to recognize particular domains by name. If needed appropriate software can be employed to identify domains. It is understood that reference to amino acids, including to a specific sequence set forth as a SEQ ID NO used to describe domain organization of an IgSF domain are for illustrative purposes and are not meant to limit the scope of the embodiments provided. It is understood that polypeptides and the description of domains thereof are theoretically derived based on homology analysis and alignments with similar molecules. Thus, the exact locus can vary, and is not necessarily the same for each protein. Hence, the specific IgSF domain, such as specific IgV domain or IgC domain, can be several amino acids (one, two, three or four) longer or shorter.

[0063] The term “ectodomain” as used herein refers to the region of a membrane protein, such as a transmembrane protein, that lies outside the vesicular membrane (e.g., the space outside of a cell). Ectodomains often interact with specific ligands or specific cell surface receptors, such as via a binding domain that specifically binds to the ligand or cell surface receptor. The ectodomain of a cellular transmembrane protein is alternately referred to as an extracellular domain.

[0064] The terms “effective amount” or “therapeutically effective amount” refer to a quantity and/or concentration of a therapeutic composition of the invention, such as composition containing engineered cells, that when administered ex vivo (by contact with a cell from a patient) or in vivo (by administration into a patient, such as by adoptive transfer) either alone (i.e., as a monotherapy) or in combination with additional therapeutic agents, yields a statistically significant inhibition of disease progression as, for example, by ameliorating or eliminating symptoms and/or the cause of the disease. An effective amount for treating an immune system disease or disorder may be an amount that relieves, lessens, or alleviates at least one symptom or biological response or effect associated with the disease or disorder, prevents progression of the disease or disorder, or improves physical functioning of the patient. In the case of cell therapy, the effective amount is an effective dose or number of cells administered to a patient. In some embodiments the patient is a human patient.

[0065] The term “endodomain” as used herein refers to the region found in some membrane proteins, such as transmembrane proteins, that extends into the interior space defined by the cell surface membrane. In mammalian cells, the endodomain is the cytoplasmic region of the membrane protein. In cells, the endodomain interacts with intracellular constituents and can be play a role in signal transduction and thus, in some cases, can be an intracellular signaling domain. The endodomain of a cellular transmembrane protein is alternately referred to as a cytoplasmic domain, which, in some cases, can be a cytoplasmic signaling domain.

[0066] The term “enhanced” or “increased” as used herein in the context of increasing immunological activity of a mammalian lymphocyte means to increase one or more activities of the lymphocyte. An increased activity can be one or more of an increase cell survival, cell proliferation, cytokine production, or T-cell cytotoxicity, such as by a statistically significant amount. In some embodiments, reference to increased immunological activity means to increase interferon gamma (IFN-gamma) production, such as by a statistically significant amount. Methods of assessing activities of lymphocytes are known in the art, including any assay as described herein. In some embodiments an enhancement can be an increase of at least 10%, 20%, 30%, 40%, 50%, 75%, 100%, 200%, 300%, 400%, or 500% greater than a non-zero control value.

[0067] The term “engineered cell” as used herein refers to a mammalian cell that has been genetically modified by human intervention such as by recombinant DNA methods or viral transduction. In some embodiments, the cell is an immune cells, such as a lymphocyte (e.g. T cell, B cell, NK cell) or an antigen presenting cell (e.g. dendritic cell). The cell can be a primary cell from a patient or can be a cell line. In the context of the present disclosure, an engineered cell comprises a transmembrane immunomodulatory protein (TIP) as described herein that is expressed on the cell and is engineered to modulate immunological activity of the engineered cell itself, or a mammalian cell to which an affinity modified IgSF domain of the TIP specifically binds. In some cases, the TIP is formatted as a chimeric receptor containing a heterologous cytoplasmic signaling domain or endodomain. Among provided TIP-engineered cells also are cells further containing an engineered T-cell receptor (TCR) or chimeric antigen receptor (CAR).

[0068] The term “engineered T-cell” as used herein refers to a T-cell such as a T helper cell, cytotoxic T-cell (alternatively, cytotoxic T lymphocyte or CTL), natural killer T-cell, regulatory T-cell, memory T-cell, or gamma delta T-cell, that has been genetically modified by human intervention such as by recombinant DNA methods. An engineered T-cell comprises a transmembrane immunomodulatory protein (TIP) of the present invention that is expressed on the T-cell and is engineered to modulate immunological activity of the engineered T-cell itself, or a mammalian cell to which an affinity modified IgSF domain of the TIP expressed on the T-cell specifically binds.

[0069] The term “engineered T-cell receptor” or “engineered TCR” refers to a T-cell receptor (TCR) engineered to specifically bind with a desired affinity to a major histocompatibility complex (MHC)/peptide target antigen that is selected, cloned, and/or subsequently introduced into a population of T-cells, often used for adoptive immunotherapy. In contrast to engineered TCRs, CARs are engineered to bind target antigens in a MHC independent manner.

[0070] The term “expressed on” as used herein is used in reference to a protein expressed on the surface of a cell, such as a mammalian cell. Thus, the protein is expressed as a membrane protein. In some embodiments, the expressed protein is a transmembrane protein. In some embodiments, the protein is conjugated to a small molecule moiety such as a drug or detectable label. Proteins expressed on the surface of a cell can include cell-surface proteins such as cell surface receptors that are expressed on mammalian cells.

[0071] The term “host cell” refers to a cell that can be used to express a protein encoded by a recombinant expression vector. A host cell can be a prokaryote, for example, E. coli, or it can be a eukaryote, for example, a single-celled eukaryote (e.g., a yeast or other fungus), a plant cell (e.g., a tobacco or tomato plant cell), an animal cell (e.g., a human cell, a monkey cell, a hamster cell, a rat cell, a mouse cell, or an insect cell) or a hybridoma. Examples of host cells include Chinese hamster ovary (CHO) cells or their derivatives such as Veggie CHO and related cell lines which grow in serum-free media or CHO strain DX-B11, which is deficient in DHFR.

[0072] The term “immunological synapse” or “immune synapse” as used herein means the interface between a mammalian cell that expresses MHC I (major histocompatibility complex) or MHC II, such as an antigen-presenting cell or tumor cell, and a mammalian lymphocyte such as an effector T cell or Natural Killer (NK) cell.

[0073] The term “immunoglobulin” (abbreviated “Ig”) as used herein is synonymous with the term “antibody” (abbreviated “Ab”) and refers to a mammalian immunoglobulin protein including any of the five human classes: IgA (which includes subclasses IgA1 and IgA2), IgD, IgE, IgG (which includes subclasses IgG1, IgG2, IgG3, and IgG4), and IgM. The term is also inclusive of immunoglobulins that are less than full-length, whether wholly or partially synthetic (e.g., recombinant or chemical synthesis) or naturally produced, such as antigen binding fragment (Fab), variable fragment (Fv) containing VH and VL, the single chain variable fragment (scFv) containing VH and VL linked together in one chain, as well as other antibody V region fragments, such as Fab′, F(ab)2, F(ab′)2, dsFv diabody, Fc, and Fd polypeptide fragments. Bispecific antibodies, homobispecific and heterobispecific, are included within the meaning of the term.

[0074] An Fc (fragment crystallizable) region or domain of an immunoglobulin molecule (also termed an Fc polypeptide) corresponds largely to the constant region of the immunoglobulin heavy chain, and is responsible for various functions, including the antibody's effector function(s). An immunoglobulin Fc fusion (“Fc-fusion”) is a molecule comprising one or more polypeptides (or one or more small molecules) operably linked to an Fc region of an immunoglobulin. An Fc-fusion may comprise, for example, the Fc region of an antibody (which, in some cases, facilitates effector functions and pharmacokinetics) and the IgSF domain of a wild-type or affinity-modified immunoglobulin superfamily domain (“IgSF”), or other protein or fragment thereof. In some embodiments, the Fc is a variant Fc that exhibits reduced (e.g. reduced greater than 30%, 40%, 50%, 60%, 70%, 80%, 90% or more) activity to facilitate an effector function. The IgSF domain mediates recognition of the cognate binding partner (comparable to that of antibody variable region of an antibody for an antigen). An immunoglobulin Fc region may be linked indirectly or directly to one or more polypeptides or small molecules (fusion partners). Various linkers are known in the art and can be used to link an Fc to a fusion partner to generate an Fc-fusion. An Fc-fusion protein of the invention typically comprises an immunoglobulin Fc region covalently linked, directly or indirectly, to at least one affinity modified IgSF domain. Fc-fusions of identical species can be dimerized to form Fc-fusion homodimers, or using non-identical species to form Fc-fusion heterodimers.

[0075] The term “immunoglobulin superfamily” or “IgSF” as used herein means the group of cell surface and soluble proteins that are involved in the recognition, binding, or adhesion processes of cells. Molecules are categorized as members of this superfamily based on shared structural features with immunoglobulins (i.e., antibodies); they all possess a domain known as an immunoglobulin domain or fold. Members of the IgSF include cell surface antigen receptors, co-receptors and co-stimulatory molecules of the immune system, molecules involved in antigen presentation to lymphocytes, cell adhesion molecules, certain cytokine receptors and intracellular muscle proteins. They are commonly associated with roles in the immune system. Proteins in the immunological synapse are often members of the IgSF. IgSF can also be classified into “subfamilies” based on shared properties such as function. Such subfamilies typically consist of from 4 to 30 IgSF members.

[0076] The terms “IgSF domain” or “immunoglobulin domain” or “Ig domain” as used herein refers a structural domain of IgSF proteins. Ig domains are named after the immunoglobulin molecules. They contain about 70-110 amino acids and are categorized according to their size and function. Ig-domains possess a characteristic Ig-fold, which has a sandwich-like structure formed by two sheets of antiparallel beta strands. Interactions between hydrophobic amino acids on the inner side of the sandwich and highly conserved disulfide bonds formed between cysteine residues in the B and F strands, stabilize the Ig-fold. One end of the Ig domain has a section called the complementarity determining region that is important for the specificity of antibodies for their ligands. The Ig like domains can be classified (into classes) as: IgV, IgC1, IgC2, or IgI. Most Ig domains are either variable (IgV) or constant (IgC). IgV domains with 9 beta strands are generally longer than IgC domains with 7 beta strands. Ig domains of some members of the IgSF resemble IgV domains in the amino acid sequence, yet are similar in size to IgC domains. These are called IgC2 domains, while standard IgC domains are called IgC1 domains. T-cell receptor (TCR) chains contain two Ig domains in the extracellular portion; one IgV domain at the N-terminus and one IgC1 domain adjacent to the cell membrane.

[0077] The term “IgSF species” as used herein means an ensemble of IgSF member proteins with identical or substantially identical primary amino acid sequence. Each mammalian immunoglobulin superfamily (IgSF) member defines a unique identity of all IgSF species that belong to that IgSF member. Thus, each IgSF family member is unique from other IgSF family members and, accordingly, each species of a particular IgSF family member is unique from the species of another IgSF family member. Nevertheless, variation between molecules that are of the same IgSF species may occur owing to differences in post-translational modification such as glycosylation, phosphorylation, ubiquitination, nitrosylation, methylation, acetylation, and lipidation. Additionally, minor sequence differences within a single IgSF species owing to gene polymorphisms constitute another form of variation within a single IgSF species as do wild type truncated forms of IgSF species owing to, for example, proteolytic cleavage. A “cell surface IgSF species” is an IgSF species expressed on the surface of a cell, generally a mammalian cell.

[0078] The term “immunological activity” as used herein in the context of mammalian lymphocytes refers to one or more cell survival, cell proliferation, cytokine production (e.g. interferon-gamma), or T-cell cytotoxicity activities. Methods to assay the immunological activity of engineered cells, including to evaluate the activity of a transmembrane immunomodulatory protein, are known in the art and include, but are not limited to, the ability to expand T cells following antigen stimulation, sustain T cell expansion in the absence of re-stimulation, and anti-cancer activities in appropriate animal models. Assays also include assays to assess cytotoxicity, including a standard ⁵¹Cr-release assay (see e.g. Milone et al., (2009) Molecular Therapy 17: 1453-1464) or flow based cytotoxicity assays, or an impedance based cytotoxicity assay (Peper et al. (2014) Journal of Immunological Methods, 405:192-198). Assays to assess immunological activity of engineered cells can be compared to control non-engineered cells or to cells containing one or more other engineered recombinant receptor (e.g. antigen receptor) with a known activity.

[0079] An “immunomodulatory protein” is a protein that modulates immunological activity. By “modulation” or “modulating” an immune response is meant that immunological activity is either enhanced or suppressed. An immunomodulatory protein can be a single polypeptide chain or a multimer (dimers or higher order multimers) of at least two polypeptide chains covalently bonded to each other by, for example, interchain disulfide bonds. Thus, monomeric, dimeric, and higher order multimeric proteins are within the scope of the defined term. Multimeric proteins can be homomultimeric (of identical polypeptide chains) or heteromultimeric (of different polypeptide chains). Transmembrane immunomodulatory proteins are a type of immunomodulatory protein.

[0080] The term “increase” as used herein means to increase by a statistically significant amount. An increase can be at least 5%, 10%, 20%, 30%, 40%, 50%, 75%, 100%, or greater than a non-zero control value.

[0081] The term “lymphocyte” as used herein means any of three subtypes of white blood cell in a mammalian immune system. They include natural killer cells (NK cells) (which function in cell-mediated, cytotoxic innate immunity), T cells (for cell-mediated, cytotoxic adaptive immunity), and B cells (for humoral, antibody-driven adaptive immunity). T cells include T helper cells, cytotoxic T-cells, natural killer T-cells, memory T-cells, regulatory T-cells, or gamma delta T-cells. Innate lymphoid cells (ILC) are also included within the definition of lymphocyte.

[0082] An “inhibitory counter-structure” is a cell membrane protein, often a receptor, which when proximally bound near a separate activating receptor leads to an attenuation in the frequency, duration, magnitude, or intensity of the activating signaling cascade and phenotype mediated by the activating receptor. Examples of inhibitory receptors include PD-1, CTLA-4, LAG-3, TIGIT, CD96, CD112R, BTLA, CD160 and TIM-3. The term “stimulatory counter-structure” is a cell membrane protein, often a receptor, which when activated and signal transduction is thereby induced, leads to an increase in the frequency, duration, or intensity of the phenotype mediated by that receptor. Examples of stimulatory receptors include CD28, ICOS, and CD226.

[0083] The term “lymphocyte” as used herein means any of three subtypes of white blood cell in a mammalian immune system. They include natural killer cells (NK cells) (which function in cell-mediated, cytotoxic innate immunity), T cells (for cell-mediated, cytotoxic adaptive immunity), and B cells (for humoral, antibody-driven adaptive immunity). T cells include: T helper cells, cytotoxic T-cells, natural killer T-cells, memory T-cells, regulatory T-cells, or gamma delta T-cells. Innate lymphoid cells (ILC) are also included within the definition of lymphocyte.

[0084] The terms “mammal,” “subject,” or “patient” specifically includes reference to at least one of a: human, chimpanzee, rhesus monkey, cynomolgus monkey, dog, cat, mouse, or rat.

[0085] The term “membrane protein” as used herein means a protein that, under physiological conditions, is attached directly or indirectly to a lipid bilayer. A lipid bilayer that forms a membrane can be a biological membrane such as a eukaryotic (e.g., mammalian) cell membrane or an artificial (i.e., man-made) membrane such as that found on a liposome. Attachment of a membrane protein to the lipid bilayer can be by way of covalent attachment, or by way of non-covalent interactions such as hydrophobic or electrostatic interactions. A membrane protein can be an integral membrane protein or a peripheral membrane protein. Membrane proteins that are peripheral membrane proteins are non-covalently attached to the lipid bilayer or non-covalently attached to an integral membrane protein. A peripheral membrane protein forms a temporary attachment to the lipid bilayer such that under the range of conditions that are physiological in a mammal, peripheral membrane protein can associate and/or disassociate from the lipid bilayer. In contrast to peripheral membrane proteins, integral membrane proteins form a substantially permanent attachment to the membrane's lipid bilayer such that under the range of conditions that are physiological in a mammal, integral membrane proteins do not disassociate from their attachment to the lipid bilayer. A membrane protein can form an attachment to the membrane by way of one layer of the lipid bilayer (monotopic), or attached by way of both layers of the membrane (polytopic). An integral membrane protein that interacts with only one lipid bilayer is an “integral monotopic protein”. An integral membrane protein that interacts with both lipid bilayers is an “integral polytopic protein” alternatively referred to herein as a “transmembrane protein”.

[0086] The terms “modulating” or “modulate” as used herein in the context of an immune response, such as a mammalian immune response, refer to any alteration, such as an increase or decrease, of an existing or potential immune responses that occurs as a result of administration of an immunomodulatory protein or as a result of administration of engineered cells expressing an immunomodulatory protein, such as atransmembrane immunomodulatory protein of the present invention. Such modulation includes any induction, or alteration in degree or extent, or suppression of immunological activity of an immune cell. Immune cells include B cells, T cells, NK (natural killer) cells, NK T cells, professional antigen-presenting cells (APCs), and non-professional antigen-presenting cells, and inflammatory cells (neutrophils, macrophages, monocytes, eosinophils, and basophils). Modulation includes any change imparted on an existing immune response, a developing immune response, a potential immune response, or the capacity to induce, regulate, influence, or respond to an immune response. Modulation includes any alteration in the expression and/or function of genes, proteins and/or other molecules in immune cells as part of an immune response. Modulation of an immune response or modulation of immunological activity includes, for example, the following: elimination, deletion, or sequestration of immune cells; proliferation, induction, survival or generation of immune cells that can modulate the functional capacity of other cells such as autoreactive lymphocytes, antigen presenting cells, or inflammatory cells; induction of an unresponsive state in immune cells (i.e., anergy); enhancing or suppressing the activity or function of immune cells, including but not limited to altering the pattern of proteins expressed by these cells. Examples include altered production and/or secretion of certain classes of molecules such as cytokines, chemokines, perforins, granzymes, growth factors, transcription factors, kinases, costimulatory molecules, or other cell surface receptors or any combination of these modulatory events. Modulation can be assessed, for example, by an alteration of an immunological activity of engineered cells, such as an alteration in cytotoxic activity of engineered cells or an alteration in cytokine secretion of engineered cells relative to cells engineered with the wild-type IgSF protein.

[0087] The term “molecular species” as used herein means an ensemble of proteins with identical or substantially identical primary amino acid sequence. Each mammalian immunoglobulin superfamily (IgSF) member defines a collection of identical or substantially identical molecular species. Thus, for example, human CD80 is an IgSF member and each human CD80 molecule is a species of CD80. Variation between molecules that are of the same molecular species may occur owing to differences in post-translational modification such as glycosylation, phosphorylation, ubiquitination, nitrosylation, methylation, acetylation, and lipidation. Additionally, minor sequence differences within a single molecular species owing to gene polymorphisms constitute another form of variation within a single molecular species as do wild type truncated forms of a single molecular species owing to, for example, proteolytic cleavage. A “cell surface molecular species” is a molecular species expressed on the surface of a mammalian cell. Two or more different species of protein, each of which is present exclusively on one or exclusively the other (but not both) of the two mammalian cells forming the IS, are said to be in “cis” or “cis configuration” with each other. Two different species of protein, the first of which is exclusively present on one of the two mammalian cells forming the IS and the second of which is present exclusively on the second of the two mammalian cells forming the IS, are said to be in “trans” or “trans configuration.” Two different species of protein each of which is present on both of the two mammalian cells forming the IS are in both cis and trans configurations on these cells.

[0088] The term “non-competitive binding” as used herein means the ability of a protein to specifically bind simultaneously to at least two cognate binding partners. In some embodiments, the binding occurs under specific binding conditions. Thus, the protein is able to bind to at least two different cognate binding partners at the same time although the binding interaction need not be for the same duration such that, in some cases, the protein is specifically bound to only one of the cognate binding partners. In some embodiments, the simultaneous binding is such that binding of one cognate binding partner does not substantially inhibit simultaneous binding to a second cognate binding partner. In some embodiments, non-competitive binding means that binding a second cognate binding partner to its binding site on the protein does not displace the binding of a first cognate binding partner to its binding site on the protein. Methods of assessing non-competitive binding are well known in the art such as the method described in Perez de La Lastra et al., Immunology, 1999 April: 96(4): 663-670. In some cases, in non-competitive interactions, the first cognate binding partner specifically binds at an interaction site that does not overlap with the interaction site of the second cognate binding partner such that binding of the second cognate binding partner does not directly interfere with the binding of the first cognate binding partner. Thus, any effect on binding of the cognate binding partner by the binding of the second cognate binding partner is through a mechanism other than direct interference with the binding of the first cognate binding partner. For example, in the context of enzyme-substrate interactions, a non-competitive inhibitor binds to a site other than the active site of the enzyme. Non-competitive binding encompasses uncompetitive binding interactions in which a second cognate binding partner specifically binds at an interaction site that does not overlap with the binding of the first cognate binding partner but binds to the second interaction site only when the first interaction site is occupied by the first cognate binding partner.

[0089] The terms “nucleic acid” and “polynucleotide” are used interchangeably to refer to a polymer of nucleic acid residues (e.g., deoxyribonucleotides or ribonucleotides) in either single- or double-stranded form. Unless specifically limited, the terms encompass nucleic acids containing known analogues of natural nucleotides and that have similar binding properties to it and are metabolized in a manner similar to naturally-occurring nucleotides. Unless otherwise indicated, a particular nucleic acid sequence also implicitly encompasses conservatively modified variants thereof (e.g., degenerate codon substitutions) and complementary nucleotide sequences as well as the sequence explicitly indicated. Specifically, degenerate codon substitutions may be achieved by generating sequences in which the third position of one or more selected (or all) codons is substituted with mixed-base and/or deoxyinosine residues. The term nucleic acid or polynucleotide encompasses cDNA or mRNA encoded by a gene.

[0090] The term “pharmaceutical composition” refers to a composition suitable for pharmaceutical use in a mammalian subject, often a human. A pharmaceutical composition typically comprises an effective amount of an active agent (e.g., an immunomodulatory protein or engineered cells expressing a transmembrane immunomodulatory protein of the present invention) and a carrier, excipient, or diluent. The carrier, excipient, or diluent is typically a pharmaceutically acceptable carrier, excipient or diluent, respectively.

[0091] The terms “polypeptide” and “protein” are used interchangeably herein and refer to a molecular chain of two or more amino acids linked through peptide bonds. The terms do not refer to a specific length of the product. Thus, “peptides,” and “oligopeptides,” are included within the definition of polypeptide. The terms include post-translational modifications of the polypeptide, for example, glycosylations, acetylations, phosphorylations and the like. The terms also include molecules in which one or more amino acid analogs or non-canonical or unnatural amino acids are included as can be synthesized, or expressed recombinantly using known protein engineering techniques. In addition, proteins can be derivatized as described herein by well-known organic chemistry techniques.

[0092] The term “primary T-cell assay” as used herein refers to an in vitro assay to measure interferon-gamma (“IFN-gamma”) expression. A variety of such primary T-cell assays are known in the art such as that described in Example 6. In a preferred embodiment, the assay used is anti-CD3 coimmobilization assay. In this assay, primary T cells are stimulated by anti-CD3 immobilized with or without additional recombinant proteins. Culture supernatants are harvested at timepoints, usually 24-72 hours. In another embodiment, the assay used is a mixed lymphocyte reaction (MLR). In this assay, primary T cells are simulated with allogenic APC. Culture supernatants are harvested at timepoints, usually 24-72 hours. Human IFN-gamma levels are measured in culture supernatants by standard ELISA techniques. Commercial kits are available from vendors and the assay is performed according to manufacturer's recommendation.

[0093] The term “purified” as applied to nucleic acids, such as encoding atransmembrane immunomodulatory proteins, or proteins (e.g. immunomodulatory proteins) generally denotes a nucleic acid or polypeptide that is substantially free from other components as determined by analytical techniques well known in the art (e.g., a purified polypeptide or polynucleotide forms a discrete band in an electrophoretic gel, chromatographic eluate, and/or a media subjected to density gradient centrifugation). For example, a nucleic acid or polypeptide that gives rise to essentially one band in an electrophoretic gel is “purified.” A purified nucleic acid, or protein is at least about 50% pure, usually at least about 75%, 80%, 85%, 90%, 95%, 96%, 99% or more pure (e.g., percent by weight or on a molar basis).

[0094] The term “recombinant” indicates that the material (e.g., a nucleic acid or a polypeptide) has been artificially (i.e., non-naturally) altered by human intervention. The alteration can be performed on the material within, or removed from, its natural environment or state. For example, a “recombinant nucleic acid” is one that is made by recombining nucleic acids, e.g., during cloning, affinity modification, DNA shuffling or other well-known molecular biological procedures. A “recombinant DNA molecule,” is comprised of segments of DNA joined together by means of such molecular biological techniques. The term “recombinant protein” or “recombinant polypeptide” as used herein refers to a protein molecule (e.g., an immunomodulatory protein) which is expressed using a recombinant DNA molecule. A “recombinant host cell” is a cell that contains and/or expresses a recombinant nucleic acid or that is otherwise altered by genetic engineering, such as by introducing into the cell a nucleic acid molecule encoding a recombinant protein, such as a transmembrane immunomodulatory protein provided herein. Transcriptional control signals in eukaryotes comprise “promoter” and “enhancer” elements. Promoters and enhancers consist of short arrays of DNA sequences that interact specifically with cellular proteins involved in transcription. Promoter and enhancer elements have been isolated from a variety of eukaryotic sources including genes in yeast, insect and mammalian cells and viruses (analogous control elements, i.e., promoters, are also found in prokaryotes). The selection of a particular promoter and enhancer depends on what cell type is to be used to express the protein of interest. The terms “in operable combination,” “in operable order” and “operably linked” as used herein refer to the linkage of nucleic acid sequences in such a manner or orientation that a nucleic acid molecule capable of directing the transcription of a given gene and/or the synthesis of a desired protein molecule is produced. The term also refers to the linkage of amino acid sequences in such a manner so that a functional protein is produced and/or transported.

[0095] The term “recombinant expression vector” as used herein refers to a DNA molecule containing a desired coding sequence (e.g., an immunomodulatory nucleic acid, a transmembrane immunomodulatory nucleic acid) and appropriate nucleic acid sequences necessary for the expression of the operably linked coding sequence in a particular cell. Nucleic acid sequences necessary for expression in prokaryotes include a promoter, optionally an operator sequence, a ribosome binding site and possibly other sequences. Eukaryotic cells are known to utilize promoters, enhancers, and termination and polyadenylation signals. A secretory signal peptide sequence can also, optionally, be encoded by the recombinant expression vector, operably linked to the coding sequence so that the expressed protein can be secreted by the recombinant host cell, for more facile isolation of the fusion protein from the cell, if desired. The term includes the vector as a self-replicating nucleic acid structure as well as the vector incorporated into the genome of a host cell into which it has been introduced. Among the vectors are viral vectors, such as lentiviral vectors.

[0096] The term “sequence identity” as used herein refers to the sequence identity between genes or proteins at the nucleotide or amino acid level, respectively. “Sequence identity” is a measure of identity between proteins at the amino acid level and a measure of identity between nucleic acids at nucleotide level. The protein sequence identity may be determined by comparing the amino acid sequence in a given position in each sequence when the sequences are aligned. Similarly, the nucleic acid sequence identity may be determined by comparing the nucleotide sequence in a given position in each sequence when the sequences are aligned. Methods for the alignment of sequences for comparison are well known in the art, such methods include GAP, BESTFIT, BLAST, FASTA and TFASTA. The BLAST algorithm calculates percent sequence identity and performs a statistical analysis of the similarity between the two sequences. The software for performing BLAST analysis is publicly available through the National Center for Biotechnology Information (NCBI) website.

[0097] The term “soluble” as used herein in reference to proteins, means that the protein is not a membrane protein. In general, a soluble protein contains only the extracellular domain of an IgSF family member receptor, or a portion thereof containing an IgSF domain or domains or specific-binding fragments thereof.

[0098] The term “species” as used herein in the context of a nucleic acid sequence or a polypeptide sequence refers to an identical collection of such sequences. Slightly truncated sequences that differ (or encode a difference) from the full length species at the amino-terminus or carboxy-terminus by no more than 1, 2, or 3 amino acid residues are considered to be of a single species. Such microheterogeneities are a common feature of manufactured proteins.

[0099] The term “specifically binds” as used herein means the ability of a protein, under specific binding conditions, to bind to a target protein such that its affinity or avidity is at least 10 times as great, but optionally 50, 100, 250 or 500 times as great, or even at least 1000 times as great as the average affinity or avidity of the same protein to a collection of random peptides or polypeptides of sufficient statistical size. A specifically binding protein need not bind exclusively to a single target molecule (e.g., its cognate binding partner) but may specifically bind to a non-target molecule due to similarity in structural conformation between the target and non-target (e.g., paralogs or orthologs). Those of skill will recognize that specific binding to a molecule having the same function in a different species of animal (i.e., ortholog) or to a non-target molecule having a substantially similar epitope as the target molecule (e.g., paralog) is possible and does not detract from the specificity of binding which is determined relative to a statistically valid collection of unique non-targets (e.g., random polypeptides). Thus, an affinity-modified polypeptide of the invention may specifically bind to more than one distinct species of target molecule due to cross-reactivity. Generally, such off-target specific binding is mitigated by reducing affinity or avidity for undesired targets. Solid-phase ELISA immunoassays or Biacore measurements can be used to determine specific binding between two proteins. Generally, interactions between two binding proteins have dissociation constants (Kd) less than 1×10-5 M, and often as low as 1×10-12 M. In certain aspects of the present disclosure, interactions between two binding proteins have dissociation constants of 1×10-6 M, 1×10-7 M, 1×10-8 M, 1×10-9 M, 1×10-10 M or 1×10-11 M.

[0100] The term “specific binding fragment” or “fragment” as used herein in reference to a mature (i.e., absent the signal peptide) wild-type IgSF domain, means a polypeptide that is shorter than the full-length mature IgSF domain and that specifically binds in vitro and/or in vivo to the wild-type IgSF domain's native cognate binding partner. In some embodiments, the specific binding fragment is at at least 20%, 30%, 40%, 50%, 60%, 70%, 75%, 80%, 85%, 90%, 95%, 96%, 97%, 98%, or 99% the sequence length of the full-length mature wild-type sequence. The specific binding fragment can be altered in sequence to form an affinity modified IgSF domain of the invention. In some embodiments, the specific binding fragment modulates immunological activity of a lymphocyte. The term “suppress” or “attenuate” or “decrease” as used herein means to decrease by a statistically significant amount. In some embodiments suppression can be a decrease of at least 10%, and up to 20%, 30%, 40%, 50%, 60%, 70%, 80%, or 90%.

[0101] The terms “surface expresses” or “surface expression” in reference to a mammalian cell expressing a polypeptide means that the polypeptide is expressed as a membrane protein. In some embodiments, the membrane protein is a transmembrane protein.

[0102] As used herein, “synthetic,” with reference to, for example, a synthetic nucleic acid molecule or a synthetic gene or a synthetic peptide refers to a nucleic acid molecule or polypeptide molecule that is produced by recombinant methods and/or by chemical synthesis methods.

[0103] The term “transmembrane protein” as used herein means a membrane protein that substantially or completely spans a lipid bilayer such as those lipid bilayers found in a biological membrane such as a mammalian cell, or in an artificial construct such as a liposome. The transmembrane protein comprises a transmembrane domain (“transmembrane domain”) by which it is integrated into the lipid bilayer and by which the integration is thermodynamically stable under physiological conditions. Transmembrane domains are generally predictable from their amino acid sequence via any number of commercially available bioinformatics software applications on the basis of their elevated hydrophobicity relative to regions of the protein that interact with aqueous environments (e.g., cytosol, extracellular fluid). A transmembrane domain is often a hydrophobic alpha helix that spans the membrane. A transmembrane protein can pass through the both layers of the lipid bilayer once or multiple times. A transmembrane protein includes the provided transmembrane immunomodulatory proteins described herein. In addition to the transmembrane domain, a transmembrane immunomodulatory protein of the invention further comprises an ectodomain and, in some embodiments, an endodomain.

[0104] The terms “treating,” “treatment,” or “therapy” of a disease or disorder as used herein mean slowing, stopping or reversing the disease or disorders progression, as evidenced by decreasing, cessation or elimination of either clinical or diagnostic symptoms, by administration of an immunomodulatory protein or engineered cells expressing a transmembrane immunomodulatory protein of the present invention either alone or in combination with another compound as described herein. “Treating,” “treatment,” or “therapy” also means a decrease in the severity of symptoms in an acute or chronic disease or disorder or a decrease in the relapse rate as for example in the case of a relapsing or remitting autoimmune disease course or a decrease in inflammation in the case of an inflammatory aspect of an autoimmune disease. As used herein in the context of cancer, the terms “treatment” or, “inhibit,” “inhibiting” or “inhibition” of cancer refers to at least one of: a statistically significant decrease in the rate of tumor growth, a cessation of tumor growth, or a reduction in the size, mass, metabolic activity, or volume of the tumor, as measured by standard criteria such as, but not limited to, the Response Evaluation Criteria for Solid Tumors (RECIST), or a statistically significant increase in progression free survival (PFS) or overall survival (OS). “Preventing,” “prophylaxis,” or “prevention” of a disease or disorder as used in the context of this invention refers to the administration of an immunomodulatory protein or engineered cells expressing a transmembrane immunomodulatory protein of the present invention, either alone or in combination with another compound, to prevent the occurrence or onset of a disease or disorder or some or all of the symptoms of a disease or disorder or to lessen the likelihood of the onset of a disease or disorder.

[0105] The term “tumor specific antigen” or “TSA” as used herein refers to a an antigen that is present primarily on tumor cells of a mammalian subject but generally not found on normal cells of the mammalian subject. In some cases, a tumor specific antigen is a counter structure or cognate binding partner of an IgSF member. A tumor specific antigen need not be exclusive to tumor cells but the percentage of cells of a particular mammal that have the tumor specific antigen is sufficiently high or the levels of the tumor specific antigen on the surface of the tumor are sufficiently high such that it can be targeted by anti-tumor therapeutics and provide prevention or treatment of the mammal from the effects of the tumor. In some embodiments, in a random statistical sample of cells from a mammal with a tumor, at least 50% of the cells displaying a TSA are cancerous. In other embodiments, at least 60%, 70%, 80%, 85%, 90%, 95%, or 99% of the cells displaying a TSA are cancerous.

[0106] The term “wild-type” or “natural” or “native” as used herein is used in connection with biological materials such as nucleic acid molecules, proteins, IgSF members, host cells, and the like, refers to those which are found in nature and not modified by human intervention.

### II. TRANSMEMBRANE IMMUNOMODULATORY PROTEINS AND ENGINEERED CELLS

[0107] Provided herein are immunomodulatory proteins that are transmembrane proteins (“transmembrane immunomodulatory proteins”). Transmembrane immunomodulatory proteins, and engineered cells expressing such transmembrane immunomodulatory proteins, generally have therapeutic utility by modulating immunological activity in a mammal with a disease or disorder in which modulation of the immune system response is beneficial. A transmembrane immunomodulatory protein of the present invention comprises an ectodomain, a transmembrane, and in some embodiments, an endodomain, such as a cytoplasmic signaling domain.

[0108] A. Ectodomain

[0109] In some embodiments, the provided transmembrane immunomodulatory proteins include an ectodomain comprising at least one affinity modified IgSF domain compared to an IgSF domain of a wild-type mammalian IgSF member. The wild-type mammalian IgSF member excludes antibodies (i.e., immunoglobulins) such as those that are mammalian or may be of mammalian origin. Thus, the present invention relates to ectodomains that are non-immunoglobulin (i.e., non-antibody) IgSF domains. Wild-type mammalian IgSF family members that are not immunoglobulins (i.e. antibodies) are known in the art as are their nucleic and amino acid sequences. Affinity-modified IgSF domains of a wild-type IgSF domain of all non-immunoglobulin mammalian IgSF family members are included as an ectodomain within the scope of the invention.

[0110] In some embodiments, transmembrane immunomodulatory proteins of the present invention in their various embodiments comprise at least one affinity modified mammalian IgSF domain, such as at least one affinity modified non-immunoglobulin mammalian IgSF domain. In some embodiments, the non-immunoglobulin IgSF family members, and the corresponding IgSF domains present therein, are of mouse, rat, cynomolgus monkey, or human origin. In some embodiments, the IgSF family members are members from at least or exactly one, two, three, four, five, or more IgSF subfamilies such as: Signal-Regulatory Protein (SIRP) Family, Triggering Receptor Expressed On Myeloid Cells Like (TREML) Family, Carcinoembryonic Antigen-related Cell Adhesion Molecule (CEACAM) Family, Sialic Acid Binding Ig-Like Lectin (SIGLEC) Family, Butyrophilin Family, B7 family, CD28 family, V-set and Immunoglobulin Domain Containing (VSIG) family, V-set transmembrane Domain (VSTM) family, Major Histocompatibility Complex (MHC) family, Signaling lymphocytic activation molecule (SLAM) family, Leukocyte immunoglobulin-like receptor (LIR), Nectin (Nec) family, Nectin-like (NECL) family, Poliovirus receptor related (PVR) family, Natural cytotoxicity triggering receptor (NCR) family, or Killer-cell immunoglobulin-like receptors (KIR) family. In some embodiments, the at least one IgSF domain is derived from an IgSF protein that is any of CD80(B7-1), CD86(B7-2), CD274 (PD-L1, B7-H1), PDCD1LG2(PD-L2, CD273), ICOSLG(B7RP1, CD275, ICOSL, B7-H2), CD276(B7-H3), VTCN1(B7-H4), CD28, CTLA4, PDCD1(PD-1), ICOS, BTLA(CD272), CD4, CD8A(CD8-alpha), CD8B(CD8-beta), LAG3, HAVCR2(TIM-3), CEACAM1, TIGIT, PVR(CD155), PVRL2(CD112), CD226, CD2, CD160, CD200, CD200R1(CD200R), and NC R3 (NKp30).

[0111] In some embodiments, the ectodomain of the transmembrane immunomodulatory protein contains at least one affinity modified IgSF domain. In some embodiments, the at least one affinity-modified IgSF domain is affinity modified compared to a corresponding IgSF domain of a non-immunoglobulin IgSF family member that is a mammalian IgSF member. In some embodiments, the mammalian IgSF member is one of the IgSF members or comprises an IgSF domain from one of the IgSF members as indicated in Table 1 including any mammalian orthologs thereof. Orthologs are genes in different species that evolved from a common ancestral gene by speciation. Normally, orthologs retain the same function in the course of evolution. In some embodiments, the affinity modified IgSF domain is an affinity modified IgV or IgC domain, including IgC1 or IgC2 domain.

[0112] In some embodiments, the ectodomain of the transmembrane immunomodulatory protein of the present invention comprises the sequence of the extracellular domain of a wild-type mammalian non-immunoglobulin (i.e., non-antibody) IgSF family member but wherein at least one IgSF domain therein is affinity modified (“Type I” transmembrane immunomodulatory proteins). Additional domains present within the IgSF family can be affinity modified, such as at least two, three, four, or five IgSF domains and, in some embodiments, exactly two, three, four, or five IgSF domains. In some embodiments of a Type I transmembrane immunomodulatory protein of the invention, the mammalian IgSF member will be one of the IgSF members as indicated in Table 1 including any mammalian orthologs thereof

[0113] The first column of Table 1 provides the name and, optionally, the name of some possible synonyms for that particular IgSF member. The second column provides the protein identifier of the UniProtKB database, a publicly available database accessible via the internet at uniprot.org. The Universal Protein Resource (UniProt) is a comprehensive resource for protein sequence and annotation data. The UniProt databases include the UniProt Knowledgebase (UniProtKB). UniProt is a collaboration between the European Bioinformatics Institute (EMBL-EBI), the SIB Swiss Institute of Bioinformatics and the Protein Information Resource (PR) and supported mainly by a grant from the U.S. National Institutes of Health (NIH). The third column provides the region where the indicated IgSF domain is located. The region is specified as a range where the domain is inclusive of the residues defining the range. Column 3 also indicates the IgSF domain class for the specified IgSF region. Column 4 provides the region where the indicated additional domains are located (signal peptide, S; extracellular domain, E; transmembrane domain, T; cytoplasmic domain, C). Column 5 indicates for some of the listed IgSF members, some of its cognate cell surface binding partners.

[0114] Typically, the affinity modified IgSF domain of the ectodomain of a transmembrane immunomodulatory protein of the provided embodiments is a human or murine affinity modified IgSF domain.

TABLE 1
IgSF members according to the present disclosure.

| | | | | | IgSF Member Amino Acid Sequence | | |
|---|---|---|---|---|---|---|---|
| | | | | Cognate Cell | (SEQ ID NO) | | |
| IgSF | UniProtKB | IgSF Region | | Surface | Precursor | | |
| Member | Protein | & Domain | Other | Binding | (mature | | |
| (Synonyms) | Identifier | Class | Domains | Partners | residues) | Mature | ECD |
| CD80 | NP_005182.1 | 35-138 or | S: 1-34, | CD28, CTLA4, | SEQ ID | SEQ ID | SEQ ID |
| (B7-1) | P33681 | 37-138 IgV, | E: 35-242, | PD-L1 | NO: 1 | NO: 393 | NO: 28 |
| | | 145-230 or | T: 243-263, | | (35-288) | | |
| | | 154-232 IgC | C: 264-288 | | | | |
| CD86 | P42081.2 | 33-131 IgV, | S: 1-23, | CD28, CTLA4 | SEQ ID | SEQ ID | SEQ ID |
| (B7-2) | | 150-225 IgC2 | E: 24-247, | | NO: 2 | NO: 394 | NO: 29 |
| | | | T: 248-268, | | (24-329) | | |
| | | | C: 269-329 | | | | |
| CD274 | Q9NZQ7.1 | 24-130 IgV, | S: 1-18, | PD-1, B7-1 | SEQ ID | SEQ ID | SEQ ID |
| (PD-L1, | | 133-225 IgC2 | E: 19-238, | | NO: 3 | NO: 395 | NO: 30 |
| B7-H1) | | | T: 239-259, | | (19-290) | | |
| | | | C: 260-290 | | | | |
| PDCD1LG2 | Q9BQ51.2 | 21-118 IgV, | S: 1-19, | PD-1, RGMb | SEQ ID | SEQ ID | SEQ ID |
| (PD-L2, | | 122-203 IgC2 | E: 20-220, | | NO: 4 | NO: 396 | NO: 31 |
| CD273) | | | T: 221-241, | | (20-273) | | |
| | | | C: 242-273 | | | | |
| ICOSLG | O75144.2 | 19-129 IgV, | S: 1-18, | ICOS, CD28, | SEQ ID | SEQ ID | SEQ ID |
| (B7RP1, | | 141-227 IgC2 | E: 19-256, | CTLA4 | NO: 5 | NO: 397 | NO: 32 |
| CD275, | | | T: 257-277, | | (19-302) | | |
| ICOSL, | | | C: 278-302 | | | | |
| B7-H2) | | | | | | | |
| CD276 | Q5ZPR3.1 | 29-139 IgV, | S: 1-28, | | SEQ ID | SEQ ID | SEQ ID |
| (B7-H3) | | 145-238 IgC2, | E: 29-466, | | NO: 6 | NO: 398 | NO: 33 |
| | | 243-357 IgV, | T: 467-487, | | (29-534) | | |
| | | 367-453 IgC | C: 488-534 | | | | |
| VTCN1 | Q7Z7D3.1 | 35-146 IgV, | S: 1-24, | | SEQ ID | SEQ ID | SEQ ID |
| (B7-H4) | | 153-241 IgV | E: 25-259, | | NO: 7 | NO: 399 | NO: 34 |
| | | | T: 260-280, | | (25-282) | | |
| | | | C: 281-282 | | | | |
| CD28 | P10747.1 | 28-137 IgV | S: 1-18, | B7-1, B7-2, | SEQ ID | SEQ ID | SEQ ID |
| | | | E: 19-152, | B7RP1 | NO: 8 | NO: 400 | NO: 35 |
| | | | T: 153-179, | | (19-220) | | |
| | | | C: 180-220 | | | | |
| CTLA4 | P16410.3 | 39-140 IgV | S: 1-35, | B7-1, B7-2, | SEQ ID | SEQ ID | SEQ ID |
| | | | E: 36-161, | B7RP1 | NO: 9 | NO: 401 | NO: 36 |
| | | | T: 162-182, | | (36-223) | | |
| | | | C: 183-223 | | | | |
| PDCD1 | Q15116.3 | 35-145 IgV | S: 1-20, | PD-L1, PD-L2 | SEQ ID | SEQ ID | SEQ ID |
| (PD-1) | | | E: 21-170, | | NO: 10 | NO: 402 | NO: 37 |
| | | | T: 171-191, | | (21-288) | | |
| | | | C: 192-288 | | | | |
| ICOS | Q9Y6W8.1 | 30-132 IgV | S: 1-20, | B7RP1 | SEQ ID | SEQ ID | SEQ ID |
| | | | E: 21-140, | | NO: 11 | NO: 403 | NO: 38 |
| | | | T: 141-161, | | (21-199) | | |
| | | | C: 162-199 | | | | |
| BTLA | Q7Z6A9.3 | 31-132 IgV | S: 1-30, | HVEM | SEQ ID | SEQ ID | SEQ ID |
| (CD272) | | | E: 31-157, | | NO: 12 | NO: 404 | NO: 39 |
| | | | T: 158-178, | | (31-289) | | |
| | | | C: 179-289 | | | | |
| CD4 | P01730.1 | 26-125 IgV, | S: 1-25, | MHC class II | SEQ ID | SEQ ID | SEQ ID |
| | | 126-203 IgC2, | E: 26-396, | | NO: 13 | NO: 405 | NO: 40 |
| | | 204-317 IgC2, | T: 397-418, | | (26-458) | | |
| | | 317-389 IgC2 | C: 419-458 | | | | |
| CD8A | P01732.1 | 22-135 IgV | S: 1-21, | MHC class I | SEQ ID | SEQ ID | SEQ ID |
| (CD8- | | | E: 22-182, | | NO: 14 | NO: 406 | NO: 41 |
| alpha) | | | T: 183-203, | | (22-235) | | |
| | | | C: 204-235 | | | | |
| CD8B | P10966.1 | 22-132 IgV | S: 1-21, | MHC class I | SEQ ID | SEQ ID | SEQ ID |
| (CD8- | | | E: 22-170, | | NO: 15 | NO: 407 | NO: 42 |
| beta) | | | T: 171-191, | | (22-210) | | |
| | | | C: 192-210 | | | | |
| LAG3 | P18627.5 | 37-167 IgV, | S: 1-28, | MHC class II | SEQ ID | SEQ ID | SEQ ID |
| | | 168-252 IgC2, | E: 29-450, | | NO: 16 | NO: 408 | NO: 43 |
| | | 265-343 IgC2, | T: 451-471, | | (29-525) | | |
| | | 349-419 IgC2 | C: 472-525 | | | | |
| HAVCR2 | Q8TDQ0.3 | 22-124 IgV | S: 1-21, | CEACAM-1, | SEQ ID | SEQ ID | SEQ ID |
| (TIM-3) | | | E: 22-202, | phosphatidyl- | NO: 17 | NO: 409 | NO: 44 |
| | | | T: 203-223, | serine, | (22-301) | | |
| | | | C: 224-301 | Galectin-9, | | | |
| | | | | HMGB1 | | | |
| CEACAM1 | P13688.2 | 35-142 IgV, | S: 1-34, | TIM-3 | SEQ ID | SEQ ID | SEQ ID |
| | | 145-232 IgC2, | E: 35-428, | | NO: 18 | NO: 410 | NO: 45 |
| | | 237-317 IgC2, | T: 429-452, | | (35-526) | | |
| | | 323-413 IgC | C: 453-526 | | | | |
| TIGIT | Q495A1.1 | 22-124 IgV | S: 1-21, | CD155, CD112 | SEQ ID | SEQ ID | SEQ ID |
| | | | E: 22-141, | | NO: 19 | NO: 411 | NO: 46 |
| | | | T: 142-162, | | (22-244) | | |
| | | | C: 163-244 | | | | |
| PVR | P15151.2 | 24-139 IgV, | S: 1-20, | TIGIT, CD226, | SEQ ID | SEQ ID | SEQ ID |
| (CD155) | | 145-237 IgC2, | E: 21-343, | CD96, | NO: 20 | NO: 412 | NO: 47 |
| | | 244-328 IgC2 | T: 344-367, | poliovirus | (21-417) | | |
| | | | C: 368-417 | | | | |
| PVRL2 | Q92692.1 | 32-156 IgV, | S: 1-31, | TIGIT, CD226, | SEQ ID | SEQ ID | SEQ ID |
| (CD112) | | 162-256 IgC2, | E: 32-360, | CD112R | NO: 21 | NO: 413 | NO: 48 |
| | | 261-345 IgC2 | T: 361-381, | | (32-538) | | |
| | | | C: 382-538 | | | | |
| CD226 | Q15762.2 | 19-126 IgC2, | S: 1-18, | CD155, CD112 | SEQ ID | SEQ ID | SEQ ID |
| | | 135-239 IgC2 | E: 19-254, | | NO: 22 | NO: 414 | NO: 49 |
| | | | T: 255-275, | | (19-336) | | |
| | | | C: 276-336 | | | | |
| CD2 | P06729.2 | 25-128 IgV, | S: 1-24, | CD58 | SEQ ID | SEQ ID | SEQ ID |
| | | 129-209 IgC2 | E: 25-209, | | NO: 23 | NO: 415 | NO: 50 |
| | | | T: 210-235, | | (25-351) | | |
| | | | C: 236-351 | | | | |
| CD160 | O95971.1 | 27-122 IgV | N/A | HVEM, MHC | SEQ ID | SEQ ID | SEQ ID |
| | | | | family of | NO: 24 | NO: 416 | NO: 51 |
| | | | | proteins | (27-159) | | |
| CD200 | P41217.4 | 31-141 IgV, | S: 1-30, | CD200R | SEQ ID | SEQ ID | SEQ ID |
| | | 142-232 IgC2 | E: 31-232, | | NO: 25 | NO: 417 | NO: 52 |
| | | | T: 233-259, | | (31-278) | | |
| | | | C: 260-278 | | | | |
| CD200R1 | Q8TD46.2 | 53-139 IgV, | S: 1-28, | CD200 | SEQ ID | SEQ ID | SEQ ID |
| (CD200R) | | 140-228 IgC2 | E: 29-243, | | NO: 26 | NO: 418 | NO: 53 |
| | | | T: 244-264, | | (29-325) | | |
| | | | C: 265-325 | | | | |
| NCR3 | O14931.1 | 19-126 IgC- | S: 1-18, | B7-H6 | SEQ ID | SEQ ID | SEQ ID |
| (NKp30) | | like | E: 19-135, | | NO: 27 | NO: 419 | NO: 54 |
| | | | T: 136-156, | | (19-201) | | |
| | | | C: 157-201 | | | | |

[0115] In some embodiments, the ectodomain of the transmembrane immunomodulatory protein further contains at least one affinity modified domain and further contains at least one non-affinity modified IgSF domain (e.g. unmodified or wildtype IgSF domain). In some embodiments, the ectodomain of the transmembrane immunomodulatory protein contains at least two affinity modified domains. In some embodiments, the ectodomain of the transmembrane immunomodulatory protein can contain a plurality of non-affinity modified IgSF domains and/or affinity modified IgSF domains such as 1, 2, 3, 4, 5, or 6 non-affinity modified IgSF and/or affinity modified IgSF domains.

[0116] In some embodiments, the ectodomain of a transmembrane immunomodulatory protein comprises a combination (a “non-wild-type combination”) and/or arrangement (a “non-wild type arrangement” or “non-wild-type permutation”) of an affinity modified and/or non-affinity modified IgSF domain sequences that are not found in wild-type IgSF family members (“Type II” immunomodulatory proteins). The sequences of the IgSF domains which are non-affinity modified (e.g., wild-type) or have been affinity modified can be mammalian, such as from mouse, rat, cynomolgus monkey, or human origin, or combinations thereof. In some embodiments, the sequence of the non-affinity modified domain is any IgSF domain set forth in Table 1. The number of such non-affinity modified or affinity modified IgSF domains present in these embodiments of a Type II immunomodulatory protein (whether non-wild type combinations or non-wild type arrangements) is at least 2, 3, 4, or 5 and in some embodiments exactly 2, 3, 4, or 5 IgSF domains.

[0117] In some embodiments, at least two of the affinity modified IgSF domains are identical affinity modified IgSF domains. In some embodiments, the affinity modified IgSF domains are non-identical (i.e., different) IgSF domains. Non-identical affinity modified IgSF domains specifically bind, under specific binding conditions, different cognate binding partners and are “non-identical” irrespective of whether or not the wild-type IgSF domains from which they are designed was the same. Thus, for example, a combination of at least two non-identical IgSF domains in the ectodomain of a transmembrane immunomodulatory protein of the present invention can comprise at least one IgSF domain sequence whose origin is from and unique to one IgSF family member and at least one of a second IgSF domain sequence whose origin is from and unique to another IgSF family member wherein the IgSF domains of the ectodomain of a transmembrane immunomodulatory protein are in affinity modified form. However, in alternative embodiments, the two non-identical IgSF domains originate from the same IgSF domain sequence but are affinity modified differently such that they specifically bind to different cognate binding partners. In some embodiments, the number of non-identical affinity modified IgSF domains present in the ectodomain of a transmembrane immunomodulatory protein of the invention is at least 2, 3, 4, or 5 and in some embodiments exactly 2, 3, 4, or 5 non-identical affinity modified IgSF domains. In some embodiments, the non-identical IgSF domains are combinations from at least two IgSF members indicated in Table 1, and in some embodiments at least three or four IgSF members of Table 1.

[0118] In other embodiments an ectodomain of a transmembrane immunomodulatory protein provided herein comprises at least two IgSF domains from a single IgSF member but in a non-wild-type arrangement. One illustrative example of a non-wild type arrangement or permutation is an immunomodulatory protein of the present invention comprising a non-wild type order of affinity modified IgSF domain sequences relative to those found in the wild-type mammalian IgSF family member whose IgSF domain sequences served as the source of the affinity modified IgSF domains. The mammalian wild-type IgSF member in the preceding embodiment specifically includes those listed in Table 1. Thus, in one example, if the wild-type family member comprises an IgC1 domain proximal to the transmembrane domain of a cell surface protein and an IgV domain distal to the transmembrane domain, then the ecotodomain of a transmembrane immunomodulatory protein provided herein can comprise an IgV proximal and an IgC1 distal to the transmembrane domain albeit in affinity modified form. The presence, in an ectodomain of a transmembrane immunomodulatory protein, of both non-wild type combinations and non-wild type arrangements of affinity modified IgSF domains is also within the scope of the present invention. A plurality of affinity modified IgSF domains in an ectodomain of a transmembrane immunomodulatory protein's polypeptide chain need not be covalently linked directly to one another. In some embodiments, an intervening span of one or more amino acid residues indirectly covalently bonds the affinity modified IgSF domains to each other. Such “peptide linkers” can be a single amino acid residue or greater in length.

[0119] In some embodiments, the affinity modified IgSF domain can be affinity modified to specifically bind to a single (e.g., 1) or multiple (e.g., 2, 3, 4, or more) counter-structures (also called a “cognate binding partner”) expressed on a mammalian cell. Typically, the counter-structure is a native counter-structure of the wild-type IgSF domain that has been affinity modified. In some embodiments, the counter-structure is an IgSF member. In some embodiments the counter-structure is a non-IgSF family member. For example, in some embodiments the counter-structure of an affinity modified IgSF domain such as BTLA (B- and T-lymphocyte attenuation) is the non-IgSF member counter-structure HVEM (herpes virus entry mediator). BTLA-HVEM complexes negatively regulate T-cell immune responses. Each IgSF domain present in a transmembrane immunomodulatory protein can be affinity modified to independently increase or attenuate specific binding affinity or avidity to each of the single or multiple counter-structures to which it binds. By this method, specific binding to each of multiple counter-structures is independently tuned to a particular affinity or avidity.

[0120] In some embodiments, the counter-structure of an IgSF domain is at least one, and sometimes at least two or three of the counter-structures (cognate binding partners) of the wild-type IgSF domain, such as those listed in Table 1. The sequence of the IgSF domain, such as mammalian IgSF domain, is affinity modified by altering its sequence with at least one substitution, addition, or deletion. Alteration of the sequence can occur at the binding site for the counter-structure or at an allosteric site. In some embodiments, a nucleic acid encoding an IgSF domain, such as a mammalian IgSF domain, is affinity modified by substitution, addition, deletion, or combinations thereof, of specific and pre-determined nucleotide sites to yield a nucleic acid encoding an ectodomain of the transmembrane immunomodulatory protein of the invention. In some contrasting embodiments, a nucleic acid encoding an IgSF domain, such as a mammalian IgSF domain, is affinity modified by substitution, addition, deletion, or combinations thereof, at random sites within the nucleic acid. In some embodiments, a combination of the two approaches (pre-determined and random) is utilized. In some embodiments, design of the affinity modified IgSF domains is performed in silico.

[0121] In some embodiments, the affinity modified IgSF domain of the ectodomain contains one or more amino acid substitutions (alternatively, “mutations” or “replacements”) relative to a wild-type or unmodified polypeptide or a portion thereof containing an immunoglobulin superfamily (IgSF) domain. In some embodiments, the IgSF domain is an IgV domain or an IgC domain or specific binding fragment of the IgV domain or the IgC domain. In some embodiments, the ectodomain of the transmembrane immunomodulatory protein comprises an affinity modified IgSF domain that contains an IgV domain or an IgC domain or specific binding fragments thereof in which the at least one of the amino acid substitutions is in the IgV domain or IgC domain or a specific binding fragment thereof. In some embodiments, by virtue of the altered binding activity or affinity, the IgV domain or IgC domain is an affinity-modified IgSF domain.

[0122] In some embodiments, the IgSF domain, such as a mammalian IgSF domain, is affinity modified in sequence with at least one but no more than a total of 1, 2, 3, 4, 5, 6, 7, 8, 9, or 10 amino acid substitutions, additions, deletions, or combinations thereof. In some embodiments, the IgSF domain, such as mammalian IgSF domain, is affinity modified in sequence with at least one but no more than 10, 9, 8, 7, 6, 5, 4, 3, 2, or 1 amino acid substitutions. In some embodiments, the substitutions are conservative substitutions. In some embodiments, the substitutions are non-conservative. In some embodiments, the substitutions are a combination of conservative and non-conservative substitutions. In some embodiments, the modification in sequence is made at the binding site of the IgSF domain for its counter-structure.

[0123] In some embodiments, the wild-type or unmodified IgSF domain is a mammalian IgSF domain. In some embodiments, the wild-type or unmodified IgSF domain can be an IgSF domain that includes, but is not limited to, human, mouse, cynomolgus monkey, or rat. In some embodiments, the wild-type or unmodified IgSF domain is human.

[0124] In some embodiments, the wild-type or unmodified IgSF domain is or comprises an extracellular domain of an IgSF family member or a portion thereof containing an IgSF domain (e.g. IgV domain or IgC domain). In some cases, the extracellular domain of an unmodified or wild-type IgSF domain can comprise more than one IgSF domain, for example, an IgV domain and an IgC domain. However, the affinity modified IgSF domain need not comprise both the IgV domain and the IgC domain. In some embodiments, the affinity modified IgSF domain comprises or consists essentially of the IgV domain or a specific binding fragment thereof. In some embodiments, the affinity modified IgSF domain comprises or consists essentially of the IgC domain or a specific binding fragment thereof. In some embodiments, the affinity modified IgSF domain comprises the IgV domain or a specific binding fragment thereof, and the IgC domain or a specific binding fragment thereof.

[0125] In some embodiments, the one or more amino acid substitutions of the affinity modified IgSF domain can be located in any one or more of the IgSF polypeptide domains. For example, in some embodiments, one or more amino acid substitutions are located in the extracellular domain of the IgSF polypeptide. In some embodiments, one or more amino acid substitutions are located in the IgV domain or specific binding fragment of the IgV domain. In some embodiments, one or more amino acid substitutions are located in the IgC domain or specific binding fragment of the IgC domain.

[0126] In some embodiments, the wild-type or unmodified IgSF domain is an IgSF domain or specific binding fragment thereof contained in the sequence of amino acids set forth in any of SEQ ID NOS:1-27 or contained in a sequence of amino acids that exhibits at least 85%, 86%, 87%, 88%, 89%, 90%, 91%, 92%, 93%, 94%, 95%, 96%, 97%, 98%, 99% or more sequence identity to any of SEQ ID NOS:1-27. In some embodiments, the IgSF domain is an IgV domain or IgC domain contained therein or specific binding fragments thereof. Table 1 identifies the IgSF domains contained in each of SEQ ID NOS: 1-27.

[0127] In some embodiments, the unmodified or wild-type IgSF domain comprises the extracellular domain (ECD) or a portion comprising an IgSF domain (e.g. IgV domain or IgC domain) of an IgSF member, such as a mammalian IgSF member. In some embodiments, the unmodified or wild-type IgSF domain comprises (i) the sequence of amino acids set forth in any of SEQ ID NOS:28-54, (ii) a sequence of amino acids that has at least about 85%, 86%, 87%, 88%, 89%, 90%, 91%, 92%, 93%, 94%, 95%, 96%, 97%, 98%, 99% sequence identity to any of SEQ ID NOS: 28-54, or (iii) is a specific binding fragment of (i) or (ii) comprising an IgV domain or an IgC domain.

[0128] In some embodiments, at least one IgSF domain, such as at least one mammalian IgSF domain, of a transmembrane immunomodulatory protein of the present invention is independently affinity modified in sequence to have at least 99%, 98%, 97%, 96%, 95%, 94%, 93%, 92%, 91%, 90%, 89%, 88%, 87%, 86% 85%, or 80% sequence identity with the corresponding wild-type IgSF domain or specific binding fragment thereof contained in a wild-type or unmodified IgSF protein, such as, but not limited to, those disclosed in Table 1 as SEQ ID NOS: 1-27.

[0129] In some embodiments, the affinity-modified IgSF domain of a transmembrane immunomodulatory protein provided herein is a specific binding fragment of a wild-type or unmodified IgSF domain contained in a wild-type or unmodified IgSF protein, such as but not limited to, those disclosed in Table 1 in SEQ ID NOS: 1-27. In some embodiments, the specific binding fragment can have an amino acid length of at least 50 amino acids, such as at least 60, 70, 80, 90, 100, or 110 amino acids. In some embodiments, the specific binding fragment of the IgV domain contains an amino acid sequence that is at least about 85%, 86%, 87%, 88%, 89%, 90%, 91%, 92%, 93%, 94%, 95%, 96%, 97%, 98%, 99% of the length of the wild-type or unmodified IgV domain. In some embodiments, the specific binding fragment of the IgC domain comprises an amino acid sequence that is at least about 85%, 86%, 87%, 88%, 89%, 90%, 91%, 92%, 93%, 94%, 95%, 96%, 97%, 98%, 99% of the length of the wild-type or unmodified IgC domain. In some embodiments, the specific binding fragment modulates immunological activity. In more specific embodiments, the specific binding fragment of an IgSF domain increases immunological activity. In alternative embodiments, the specific binding fragment decreases immunological activity.

[0130] In some embodiments, to determine the percent identity of two nucleic acid sequences or of two amino acids, the sequences are aligned for optimal comparison purposes (e.g., gaps may be introduced in the sequence of a first amino acid or nucleic acid sequence for optimal alignment with a second amino or nucleic acid sequence). The amino acid residues or nucleotides at corresponding amino acid positions or nucleotide positions are then compared. When a position in the first sequence is occupied by the same amino acid residue or nucleotide as the corresponding position in the second sequence, then the molecules are identical at that position. The percent identity between the two sequences is a function of the number of identical positions shared by the sequences (i.e., % identity=# of identical positions/total # of positions (e.g., overlapping positions)×100). In one embodiment the two sequences are the same length. One may manually align the sequences and count the number of identical nucleic acids or amino acids. Alternatively, alignment of two sequences for the determination of percent identity may be accomplished using a mathematical algorithm. Such an algorithm is incorporated into the NBLAST and XBLAST programs. BLAST nucleotide searches may be performed with the NBLAST program, score=100, wordlength=12, to obtain nucleotide sequences homologous to a nucleic acid molecules of the invention. BLAST protein searches may be performed with the XBLAST program, score=50, wordlength=3 to obtain amino acid sequences homologous to a protein molecule of the invention. To obtain gapped alignments for comparison purposes, Gapped BLAST may be utilized. Alternatively, PSI-Blast may be used to perform an iterated search which detects distant relationships between molecules. When utilizing the NBLAST, XBLAST, and Gapped BLAST programs, the default parameters of the respective programs may be used such as those available on the NCBI website. Alternatively, sequence identity may be calculated after the sequences have been aligned e.g. by the BLAST program in the NCBI database. Generally, the default settings with respect to e.g. “scoring matrix” and “gap penalty” may be used for alignment. In the context of the present invention, the BLASTN and PSI BLAST NCBI default settings may be employed.

[0131] The means by which the affinity-modified IgSF domains of the transmembrane immunomodulatory proteins are designed or created is not limited to any particular method. In some embodiments, however, wild-type IgSF domains are mutagenized (site specific, random, or combinations thereof) from wild-type IgSF genetic material and screened for altered binding according to the methods disclosed in the Examples. Methods or mutagenizing nucleic acids is known to those of skill in the art. In some embodiments, the affinity modified IgSF domains are synthesized de novo utilizing protein or nucleic acid sequences available at any number of publicly available databases and then subsequently screened. The National Center for Biotechnology Information provides such information and its website is publicly accessible via the internet as is the UniProtKB database as discussed previously.

[0132] In some embodiments, at least one non-affinity modified IgSF domain and/or one affinity modified IgSF domain present in the ectodomain of a transmembrane immunomodulatory protein provided herein specifically binds to at least one cell surface molecular species expressed on mammalian cells forming the immunological synapse (IS). In some embodiments, an ectodomain of a transmembrane immunomodulatory protein provided herein can comprise a plurality of non-affinity modified IgSF domains and/or affinity modified IgSF domains such as 1, 2, 3, 4, 5, or 6 non-affinity modified IgSF and/or affinity modified IgSF domains. One or more of these non-affinity modified IgSF domains and/or affinity modified IgSF domains can independently specifically bind to either one or both of the mammalian cells forming the IS.

[0133] Often, the cell surface molecular species to which the affinity modified IgSF domain of the ectodomain specifically binds will be the cognate binding partner of the wild type IgSF family member or wild type IgSF domain that has been affinity modified. In some embodiments, the cell surface molecular species is a mammalian IgSF member. In some embodiments, the cell surface molecular species is a human IgSF member. In some embodiments, the cell surface molecular species will be the cell surface cognate binding partners as indicated in Table 1. In some embodiments, the cell surface molecular species will be a viral protein, such as a poliovirus protein, on the cell surface of a mammalian cell such as a human cell.

[0134] In some embodiments, at least one non-affinity modified and/or affinity modified IgSF domain of the ectodomain of a transmembrane immunomodulatory protein provided herein binds to at least two or three cell surface molecular species present on mammalian cells forming the IS. The cell surface molecular species to which the non-affinity modified IgSF domains and/or the affinity modified IgSF domains of the ectodomain specifically bind to can exclusively be on one or the other of the two mammalian cells (i.e. in cis configuration) forming the IS or, alternatively, the cell surface molecular species can be present on both.

[0135] In some embodiments, the affinity modified IgSF domain specifically binds to at least two cell surface molecular species wherein one of the molecular species is present on one of the two mammalian cells forming the IS and the other molecular species is present on the second of the two mammalian cells forming the IS. In such embodiments, the cell surface molecular species is not necessarily present solely on one or the other of the two mammalian cells forming the IS (i.e., in a trans configuration) although in some embodiments it is. Thus, embodiments provided herein include those wherein each cell surface molecular species is exclusively on one or the other of the mammalian cells forming the IS (cis configuration) as well as those where the cell surface molecular species to which each affinity modified IgSF binds is present on both of the mammalian cells forming the IS (i.e., cis and trans configuration).

[0136] Those of skill will recognize that antigen presenting cells (APCs) and tumor cells form an immunological synapse with lymphocytes. Thus, in some embodiments at least one non-affinity modified IgSF domain and/or at least one affinity modified IgSF domain of the ectodomain of a transmembrane immunomodulatory protein specifically binds to only cell surface molecular species present on a cancer cell, wherein the cancer cell in conjunction with a lymphocyte forms the IS. In other embodiments, at least one non-affinity modified IgSF domain and/or at least one affinity modified IgSF domain of the ectodomain of a transmembrane immunomodulatory protein specifically binds to only cell surface molecular species present on a lymphocyte, wherein the lymphocyte in conjunction with an APC or tumor cell forms the IS. In some embodiments, the non-affinity modified IgSF domain and/or affinity modified IgSF domain bind to cell surface molecular species present on both the target cell (or APC) and the lymphocyte forming the IS.

[0137] Embodiments of the invention include those in which an ectodomain of a transmembrane immunomodulatory protein provided herein comprises at least one affinity modified IgSF domain with an amino acid sequence that differs from a wild-type or unmodified IgSF domain (e.g. a mammalian IgSF domain) such that the binding affinity (or avidity if in a multimeric or other relevant structure) of the affinity-modified IgSF domain, under specific binding conditions, to at least one of its cognate binding partners is either increased or decreased relative to the unaltered wild-type or unmodified IgSF domain control. In some embodiments, an affinity modified IgSF domain has a binding affinity for a cognate binding partner that differs from that of a wild-type or unmodified IgSF control sequence as determined by, for example, solid-phase ELISA immunoassays, flow cytometry or Biacore assays. In some embodiments, the affinity modified IgSF domain has an increased binding affinity for one or more cognate binding partners, relative to a wild-type or unmodified IgSF domain. In some embodiments, the affinity modified IgSF domain has a decreased binding affinity for one or more cognate binding partners, relative to a wild-type or unmodified IgSF domain. In some embodiments, the cognate binding partner can be a mammalian protein, such as a human protein or a murine protein.

[0138] Binding affinities for each of the cognate binding partners are independent; that is, in some embodiments, an affinity modified IgSF domain has an increased binding affinity for one, two or three different cognate binding partners, and a decreased binding affinity for one, two or three of different cognate binding partners, relative to a wild-type or unmodified polypeptide.

[0139] In some embodiments, the ectodomain of a transmembrane immunomodulatory protein provided herein comprises at least one affinity modified domain in which the binding affinity or avidity of the affinity modified IgSF domain is increased at least 10%, 20%, 30%, 40%, 50%, 100%, 200%, 300%, 400%, 500%, 1000%, 5000%, or 10,000% relative to the wild type or unmodified control IgSF domain. In some embodiments, the increase in binding affinity relative to the wild-type or unmodified IgSF domain is more than 1.2-fold, 1.5-fold, 2-fold, 3-fold, 4-fold, 5-fold, 6-fold, 7-fold, 8-fold, 9-fold, 10-fold, 20-fold, 30-fold 40-fold or 50-fold.

[0140] In some embodiments, the ectodomain of a transmembrane immunomodulatory protein provided herein comprises at least one affinity modified domain in which the binding affinity or avidity of the affinity modified IgSF domain is decreased at least 10%, and up to 20%, 30%, 40%, 50%, 60%, 70%, 80% or up to 90% relative to the wild type or unmodified control IgSF domain. In some embodiments, the decrease in binding affinity relative to the wild-type or unmodified IgSF domain is more than 1.2-fold, 1.5-fold, 2-fold, 3-fold, 4-fold, 5-fold, 6-fold, 7-fold, 8-fold, 9-fold, 10-fold, 20-fold, 30-fold 40-fold or 50-fold.

[0141] In some embodiments, the ectodomain of a transmembrane immunomodulatory protein provided herein comprises at least one affinity modified domain in which its specific binding affinity to a cognate binding partner can be at least 1×10⁻⁵ M, 1×10⁻⁶ M, 1×10⁻⁷ M, 1×10⁻⁸ M, 1×10⁻⁹ M, 1×10⁻¹⁰ M or 1×10⁻11 M, or 1×10⁻¹² M.

[0142] In some embodiments, the ectodomain of a transmembrane immunomodulatory protein provided comprises at least two IgSF domains in which at least one of the IgSF domain is affinity modified while in some embodiments both are affinity modified, and wherein at least one of the affinity modified IgSF domains has increased affinity (or avidity) to its cognate binding partner and at least one affinity modified IgSF domain has a decreased affinity (or avidity) to its cognate binding partner. Functionally, and irrespective of whether specific binding to its cognate binding partner is increased or decreased, the transmembrane immunomodulatory protein comprising the ectodomain acts to enhance or suppress immunological activity of engineered immune cells, such as lymphocytes or antigen presenting cells, relative to engineered immune cells expressing the wild-type, parental molecule under the appropriate assay controls. In some embodiments, a transmembrane immunomodulatory protein comprising an ectodomain that comprises at least two affinity modified IgSF domains is one in which at least one of the affinity modified IgSF domains agonizes an activating receptor and at least one affinity modified IgSF domain acts to antagonize an inhibitory receptor. In some embodiments, an enhancement of immunological activity can be an increase of at least 10%, 20%, 30%, 40%, 50%, 75%, 100%, 200%, 300%, 400%, or 500% greater than a non-zero control value such as in a cytotoxic activity assay, an assay for assessing cellular cytokines or a cell proliferation assay. In some embodiments, suppression of immunological activity can be a decrease of at least 10%, and up to 20%, 30%, 40%, 50%, 60%, 70%, 80%, or 90%.

[0143] The affinity modified IgSF domains of the transmembrane immunomodulatory proteins of the invention can in some embodiments specifically bind competitively to its counter-structure. In other embodiments the affinity modified IgSF domains of the present invention specifically bind non-competitively to its counter-structure.

[0144] In some embodiments, the ectodomain of a transmembrane immunomodulatory protein provided herein contains an IgSF domain that otherwise binds to multiple cell surface molecular species but is affinity modified such that it substantially no longer specifically binds to one of its cognate cell surface molecular species. Thus, in these embodiments the specific binding to one of its cognate cell surface molecular species is reduced to specific binding of no more than 90% of the wild type level, such as no more than 80%, 70%, 60%, 50%, 40%, 30%, 20% or less. In some embodiments, the specific binding to one of its cognate cell surface molecular species is reduced to specific binding of no more than 10% of the wild type level and often no more than 7%, 5%, 3%, 1%, or no detectable or statistically significant specific binding.

[0145] In some embodiments, a specific binding site on a mammalian IgSF domain is inactivated or substantially inactivated with respect to at least one of the cell surface molecular species. Thus, for example, if a wild type IgSF domain specifically binds to exactly two cell surface molecular species then in some embodiments it is affinity modified to specifically bind to exactly one cell surface molecular species. And, if a wild type IgSF domain specifically binds to exactly three cell surface molecular species then in some embodiments it is affinity modified to specifically bind to exactly two cell surface molecular species. The IgSF domain that is affinity modified to substantially no longer specifically bind to one of its cognate cell surface molecular species can be an IgSF domain that otherwise specifically binds competitively or non-competitively to its cell surface molecular species. An illustrative example concerns native CD80 (B7-1) which specifically binds counter-structures: CD28, PD-L1, and CTLA4. In some embodiments, CD80 can be IgSF affinity modified to increase or attenuate its specific binding to CD28 and/or PD-L1 but not to specifically bind to any physiologically significant extent to CTLA4. The IgSF domain that is affinity modified to substantially no longer specifically bind to one of its cell surface counter-structures can be an IgSF domain that otherwise specifically binds competitively or non-competitively to its counter-structure. Those of skill will appreciate that a wild type IgSF domain that competitively binds to two cognate binding partners can nonetheless be inactivated with respect to exactly one of them if, for example, their binding sites are not precisely coextensive but merely overlap such that specific binding of one inhibits binding of the other cognate binding partner and yet both competitive binding sites are distinct.

[0146] The non-affinity modified IgSF domains and/or affinity modified IgSF domains of the ectodomain of provided transmembrane immunomodulatory proteins provided can in some embodiments specifically bind competitively to its cognate cell surface molecular species. In other embodiments the non-affinity modified IgSF domains and/or affinity modified IgSF domains of the ectodomain of a transmembrane immunomodulatory protein provided herein specifically bind non-competitively to its cognate cell surface molecular species. Any number of the non-affinity modified IgSF domains and/or affinity modified IgSF domains present in the ectodomain of a transmembrane immunomodulatory protein provided herein can specifically bind competitively or non-competitively.

[0147] In some embodiments, the ectodomain of a transmembrane immunomodulatory protein provided herein comprises at least two non-affinity modified IgSF domains, or at least one non-affinity modified IgSF domain and at least one affinity modified IgSF domain, or at least two affinity modified IgSF domains wherein one IgSF domain specifically binds competitively and a second IgSF domain binds non-competitively to its cognate cell surface molecular species. More generally, the ectodomain of a transmembrane immunomodulatory protein provided herein can comprise 1, 2, 3, 4, 5, or 6 competitive or 1, 2, 3, 4, 5, or 6 non-competitive binding non-affinity modified IgSF and/or affinity modified IgSF domains or any combination thereof. Thus, the ectodomain of an immunomodulatory protein provided herein can have the number of non-competitive and competitive binding IgSF domains, respectively, of: 0 and 1, 0 and 2, 0 and 3, 0 and 4, 1 and 0, 1 and 1, 1 and 2, 1 and 3, 2 and 0, 2 and 1, 2 and 2, 2 and 3, 3 and 0, 3 and 1, 3 and 2, 3 and 3, 4 and 0, 4 and 1, and, 4 and 2.

[0148] In some embodiments in which the ectodomain contains a plurality of IgSF domain, the plurality of non-affinity modified and/or affinity modified IgSF domains of the ectodomain of the transmembrane immunomodulatory protein provided herein need not be covalently linked directly to one another. In some embodiments, an intervening span of one or more amino acid residues indirectly covalently bonds the non-affinity modified and/or affinity modified IgSF domains to each other. The linkage can be via the N-terminal to C-terminal residues.

[0149] In some embodiments, the linkage can be made via side chains of amino acid residues that are not located at the N-terminus or C-terminus of the non-affinity modified or affinity modified IgSF domain. Thus, linkages can be made via terminal or internal amino acid residues or combinations thereof.

[0150] The “peptide linkers” that link the non-affinity modified and/or affinity modified IgSF domains can be a single amino acid residue or greater in length. In some embodiments, the peptide linker has at least one amino acid residue but is no more than 20, 19, 18, 17, 16, 15, 14, 13, 12, 11, 10, 9, 8, 7, 6, 5, 4, 3, 2, or 1 amino acid residues in length. In some embodiments, the linker is (in one-letter amino acid code): GGGGS (“4GS”) or multimers of the 4GS linker, such as repeats of 2, 3, 4, or 5 4GS linkers.

[0151] Exemplary Affinity Modified Domains and Ectodomains

[0152] In some embodiments, the ectodomain of a provided transmembrane immunomodulatory protein contains an affinity modified IgSF domain that has one or more amino acid substitutions in an IgSF domain of a wild-type or unmodified IgSF protein, such as set forth in Table 1 above. In some embodiments, the one or more amino acid substitutions are in the IgV domain or specific binding fragment thereof. In some embodiments, the one or more amino acid substitutions are in the IgC domain or specific binding fragment thereof. In some embodiments, one or more amino acid substitutions are in the IgV domain or a specific binding fragment thereof, and some of the one or more amino acid substitutions are in the IgC domain or a specific binding fragment thereof.

[0153] In some embodiments, the affinity modified IgSF domain of the ectodomain has up to 1, 2, 3, 4, 5, 6, 7, 8, 9, 10, 11, 12, 13, 14, 15, 16, 17, 18, 19, or 20 amino acid substitutions. The substitutions can be in the IgV domain or the IgC domain. In some embodiments, the affinity modified IgSF domain has up to 1, 2, 3, 4, 5, 6, 7, 8, 9, 10, 11, 12, 13, 14, 15, 16, 17, 18, 19, or 20 amino acid substitutions in the IgV domain or specific binding fragment thereof. In some embodiments, the affinity modified IgSF domain has up to 1, 2, 3, 4, 5, 6, 7, 8, 9, 10, 11, 12, 13, 14, 15, 16, 17, 18, 19, or 20 amino acid substitutions in the IgC domain or specific binding fragment thereof. In some embodiments, the affinity modified IgSF domain has at least about 85%, 86%, 86%, 88%, 89%, 90%, 91%, 92%, 93%, 94%, 95%, 96%, 97%, 98%, or 99% sequence identity with the wild-type or unmodified IgSF domain or specific binding fragment thereof, such as an IgSF domain contained in the IgSF protein set forth in any of SEQ ID NOS: 1-27.

[0154] In some embodiments, the transmembrane immunomodulatory protein contains an ectodomain that includes at least one affinity modified IgSF domain containing one or more amino acid substitutions in a wild-type or unmodified IgSF domain of a B7 IgSF family member. In some embodiments, the B7 IgSF family member is CD80, CD86 or ICOS Ligand (ICOSL). In some embodiments, the affinity modified IgSF domain of the ectodomain has at least about 85%, 86%, 86%, 88%, 89%, 90%, 91%, 92%, 93%, 94%, 95%, 96%, 97%, 98%, or 99% sequence identity with the wild-type or unmodified IgSF domain or specific binding fragment thereof of CD80, CD86 or ICOS Ligand (ICOSL), such as the IgSF domain (e.g. IgV or IgC) contained in the IgSF protein set forth in any of SEQ ID NOS: 1, 2 or 5. Exemplary affinity modified IgSF domains of CD80 are set forth in Table 2. Exemplary affinity modified IgSF domains of ICOSL are set forth in Table 3. Exemplary affinity modified IgSF domains of CD86 are set forth in Table 4.

TABLE 2
Exemplary variant CD80 polypeptides

| | ECD | IgV |
|---|---|---|
| | SEQ ID | SEQ ID |
| Mutation(s) | NO | NO |
| Wild-type | 28 | 152 |
| L70Q/A91G | 55 | 153 |
| L70Q/A91G/T130A | 56 | |
| L70Q/A91G/I118A/T120S/T130A | 57 | |
| V4M/L70Q/A91G/T120S/T130A | 58 | 154 |
| L70Q/A91G/T120S/T130A | 59 | |
| V20L/L70Q/A91S/T120S/T130A | 60 | 155 |
| S44P/L70Q/A91G/T130A | 61 | 156 |
| L70Q/A91G/E117G/T120S/T130A | 62 | |
| A91G/T120S/T130A | 63 | 157 |
| L70R/A91G/T120S/T130A | 64 | 158 |
| L70Q/E81A/A91G/T120S/I127T/T130A | 65 | 159 |
| L70Q/Y87N/A91G/T130A | 66 | 160 |
| T28S/L70Q/A91G/E95K/T120S/T130A | 67 | 161 |
| N63S/L70Q/A91G/T120S/T130A | 68 | 162 |
| K36E/I67T/L70Q/A91G/T120S/T130A/N152T | 69 | 163 |
| E52G/L70Q/A91G/T120S/T130A | 70 | 164 |
| K37E/F59S/L70Q/A91G/T120S/T130A | 71 | 165 |
| A91G/S103P | 72 | |
| K89E/T130A | 73 | 166 |
| A91G | 74 | |
| D60V/A91G/T120S/T130A | 75 | 167 |
| K54M/A91G/T120S | 76 | 168 |
| M38T/L70Q/E77G/A91G/T120S/T130A/N152T | 77 | 169 |
| R29H/E52G/L70R/E88G/A91G/T130A | 78 | 170 |
| Y31H/T41G/L70Q/A91G/T120S/T130A | 79 | 171 |
| V68A/110A | 80 | 172 |
| S66H/D90G/T110A/F116L | 81 | 173 |
| R29H/E52G/T120S/T130A | 82 | 174 |
| A91G/L102S | 83 | |
| I67T/L70Q/A91G/T120S | 84 | 175 |
| L70Q/A91G/T110A/T120S/T130A | 85 | |
| M38V/T41D/M43I/W50G/D76G/V83A/K89E/ | 86 | 176 |
| T120S/T130A | | |
| V22A/L70Q/S121P | 87 | 177 |
| A12V/S15F/Y31H/T41G/T130A/P137L/N152T | 88 | 178 |
| I67F/L70R/E88G/A91G/T120S/T130A | 89 | 179 |
| E24G/L25P/L70Q/T120S | 90 | 180 |
| A91G/F92L/F108L/T120S | 91 | 181 |
| R29D/Y31L/Q33H/K36G/M38I/T41A/M43R/ | 92 | 182 |
| M47T/E81V/L85R/K89N/A91T/F92P/K93V/ | | |
| R94L/I118T/N149S | | |
| R29D/Y31L/Q33H/K36G/M38I/T41A/M43R/ | 93 | |
| M47T/E81V/L85R/K89N/A91T/F92P/K93V/ | | |
| R94L/N144S/N149S | | |
| R29D/Y31L/Q33H/K36G/M38I/T41A/M42T/ | 94 | 183 |
| M43R/M47T/E81V/L85R/K89N/A91T/F92P/ | | |
| K93V/R94L/L148S/N149S | | |
| E24G/R29D/Y31L/Q33H/K36G/M38I/T41A/ | 95 | 184 |
| M43R/M47T/F59L/E81V/L85R/K89N/A91T/ | | |
| F92P/K93V/R94L/H96R/N149S/C182S | | |
| R29D/Y31L/Q33H/K36G/M38I/T41A/M43R/ | 96 | |
| M47T/E81V/L85R/K89N/A91T/F92P/ | | |
| K93V/R94L/N149S | | |
| R29V/M43Q/E81R/L85I/K89R/D90L/ | 97 | 185 |
| A91E/F92N/K93Q/R94G | | |
| T41I/A91G | 98 | 186 |
| K89R/D90K/A91G/F92Y/K93R/N122S/N177S | 99 | 187 |
| K89R/D90K/A91G/F92Y/K93R | 100 | |
| K36G/K37Q/M38I/F59L/E81V/L85R/ | 101 | 188 |
| K89N/A91T/F92P/K93V/R94L/E99G/ | | |
| T130A/N149S | | |
| E88D/K89R/D90K/A91G/F92Y/K93R | 102 | 189 |
| K36G/K37Q/M38I/L40M | 103 | 190 |
| K36G | 104 | 191 |
| R29H/Y31H/T41G/Y87N/E88G/K89E/ | 105 | 192 |
| D90N/A91G/P109S | | |
| A12T/H18L/N43V/F59L/E77K/P109S/I118T | 106 | 193 |
| R29V/Y31F/K36G/M38L/N43Q/E81R/V83I/ | 107 | 194 |
| L85I/K89R/D90L/A91E/F92N/K93Q/R94G | | |
| V68M/L70P/L72P/K86E | 108 | 195 |

TABLE 3
Exemplary variant ICOSL polypeptides

| | ECD | IgV |
|---|---|---|
| | SEQ ID | SEQ ID |
| Mutation(s) | NO | NO |
| Wild-type | 32 | 196 |
| N52S | 109 | 197 |
| N52H | 110 | 198 |
| N52D | 111 | 199 |
| N52Y/N57Y/F138L/L203P | 112 | 200 |
| N52H/N57Y/Q100P | 113 | 201 |
| N52S/Y146C/Y152C | 114 | |
| N52H/C198R | 115 | |
| N52H/C140D/T225A | 116 | |
| N52H/C198R/T225A | 117 | |
| N52H/K92R | 118 | 202 |
| N52H/S99G | 119 | 203 |
| N52Y | 120 | 204 |
| N57Y | 121 | 205 |
| N57Y/Q100P | 122 | 206 |
| N52S/S130G/Y152C | 123 | |
| N52S/Y152C | 124 | |
| N52S/C198R | 125 | |
| N52Y/N57Y/Y152C | 126 | |
| N52Y/N57Y/129P/C198R | 127 | |
| N52H/L161P/C198R | 128 | |
| N52S/T113E | 129 | |
| S54A | 130 | 207 |
| N52D/S54P | 131 | 208 |
| N52K/L208P | 132 | 209 |
| N52S/Y152H | 133 | |
| N52D/V151A | 134 | |
| N52H/I143T | 135 | |
| N52S/L80P | 136 | 210 |
| F120S/Y152H/N201S | 137 | |
| N52S/R75Q/L203P | 138 | 211 |
| N52S/D158G | 139 | |
| N52D/Q133H | 140 | |
| N52S/N57Y/H94D/L96F/L98F/Q100R | 141 | 212 |
| N52S/N57Y/H94D/L96F/L98F/Q100R/G103E/F120S | 142 | 213 |
| N52S/G103E | 239 | 240 |

TABLE 4
Exemplary variant CD86 polypeptides

| | ECD | IgC |
|---|---|---|
| | SEQ ID | SEQ ID |
| Mutation(s) | NO | NO |
| Wild-type | 29 | 220 |
| Q35H/H90L/Q102H | 148 | 221 |
| Q35H | 149 | 222 |
| H90L | 150 | 223 |
| Q102H | 151 | 224 |

[0155] In some embodiments, the transmembrane immunomodulatory protein contains an ectodomain that includes at least one affinity modified IgSF domain containing one or more amino acid substitutions in a wild-type or unmodified IgSF domain of a poliovirus receptor IgSF family member. In some embodiments, the poliovirus IgSF family member is CD155 (PVR) or CD122 (PRR-2). In some embodiments, the affinity modified IgSF domain of the ectodomain has at least about 85%, 86%, 86%, 88%, 89%, 90%, 91%, 92%, 93%, 94%, 95%, 96%, 97%, 98%, or 99% sequence identity with the wild-type or unmodified IgSF domain or specific binding fragment thereof of CD155 or CD112, such as an IgSF domain (e.g. IgV or IgC) contained in the IgSF protein set forth in any of SEQ ID NO:20 or 21. Exemplary affinity modified IgSF domains of CD155 are set forth in Table 5. Exemplary affinity modified IgSF domains of CD112 are set forth in Table 6.

TABLE 5
Exemplary variant CD155 polypeptides

| | ECD | IgV |
|---|---|---|
| | SEQ ID | SEQ ID |
| Mutation(s) | NO | NO |
| Wild-type | 47 | 241 |
| P18S, P64S, F91S | 242 | 264 |
| P18S, F91S, L104P | 243 | 265 |
| L44P | 244 | 266 |
| A56V | 245 | 267 |
| P18L, L79V, F91S | 246 | 268 |
| P18S, F91S | 247 | 269 |
| P18T, F91S | 248 | 270 |
| P18T, S42P, F91S | 249 | 271 |
| G7E, P18T, Y30C, F91S | 250 | 272 |
| P18T, F91S, G111D | 251 | 273 |
| P18S, F91P | 252 | 274 |
| P18T, F91S, F108L | 253 | 275 |
| P18S, F91S | 254 | 276 |
| P18T, T45A, F91S | 255 | 277 |
| P18T, F91S, R94H | 256 | 278 |
| P18S, Y30C, F91S | 257 | 279 |
| A81V, L83P | 258 | 280 |
| L88P | 259 | 281 |
| R94H | 260 | 282 |
| A13E, P18S, A56V, F91S | 261 | 283 |
| P18T, F91S, V115A | 262 | 284 |
| P18T, Q60K | 263 | 285 |

TABLE 6
Exemplary variant CD112 polypeptides

| | ECD | IgV |
|---|---|---|
| | SEQ ID | SEQ ID |
| Mutation(s) | NO | NO |
| Wild-type | 48 | 286 |
| Y33H, A112V, G117D | 287 | 334 |
| V19A, Y33H, S64G, S80G, G98S, N106Y, A112V | 288 | 335 |
| L32P, A112V | 289 | 336 |
| A95V, A112I | 290 | 337 |
| P28S, A112V | 291 | 338 |
| P27A, T38N, V101A, A112V | 292 | 339 |
| S118F | 293 | 340 |
| R12W, H48Y, F54S, S118F | 294 | 341 |
| R12W, Q79R, S118F | 295 | 342 |
| T113S, S118Y | 296 | 343 |
| S118Y | 297 | 344 |
| N106I, S118Y | 298 | 345 |
| N106I, S118F | 299 | 346 |
| A95T, L96P, S118Y | 300 | 347 |
| Y33H, P67S, N106Y, A112V | 301 | 348 |
| N106Y, A112V | 302 | 349 |
| T18S, Y33H, A112V | 303 | 350 |
| P9S, Y33H, N47S, A112V | 304 | 351 |
| P42S, P67H, A112V | 305 | 352 |
| P27L, L32P, P42S, A112V | 306 | 353 |
| G98D, A112V | 307 | 354 |
| Y33H, S35P, N106Y, A112V | 308 | 355 |
| L32P, P42S, T100A, A112V | 309 | 356 |
| P27S, P45S, N106I, A112V | 310 | 357 |
| Y33H, N47K, A112V | 311 | 358 |
| Y33H, N106Y, A112V | 312 | 359 |
| K78R, D84G, A112V, F114S | 313 | 360 |
| Y33H, N47K, F54L, A112V | 314 | 361 |
| Y33H, A112V | 315 | 362 |
| A95V, A112V | 316 | 363 |
| R12W, A112V | 317 | 364 |
| R12W, P27S, A112V | 318 | 365 |
| Y33H, V51M, A112V | 319 | 366 |
| Y33H, A112V, S118T | 320 | 367 |
| Y33H, V101A, A112V, P115S | 321 | 368 |
| H24R, T38N, D43G, A112V | 322 | 369 |
| A112V | 323 | 370 |
| P27A, A112V | 324 | 371 |
| A112V, S118T | 325 | 372 |
| R12W, A112V, M122I | 326 | 373 |
| Q83K, N106Y, A112V | 327 | 374 |
| R12W, P27S, A112V, S118T | 328 | 375 |
| P28S,Y33H, A112V | 329 | 376 |
| P27S, Q90R, A112V | 330 | 377 |
| L15V, P27A, A112V, S118T | 331 | 378 |
| Y33H, N106Y, T108I, A112V | 332 | 379 |
| Y33H, P56L, V75M, V101M, A112V | 333 | 380 |

[0156] In some embodiments, the transmembrane immunomodulatory protein contains an ectodomain that includes an affinity modified IgSF domain containing one or more amino acid substitutions in a wild-type or unmodified IgSF domain of an NkP30 family member. In some embodiments, the affinity modified IgSF domain has at least about 85%, 86%, 86%, 88%, 89%, 90%, 91%, 92%, 93%, 94%, 95%, 96%, 97%, 98%, or 99% sequence identity with the wild-type or unmodified IgSF domain or specific binding fragment thereof of an NkP30 family member, such as the IgSF domain (e.g. IgC) contained in the IgSF protein set forth in SEQ ID NO: 27. Table 7 provides exemplary affinity modified NkP30 IgSF domains.

TABLE 7
Exemplary variant NKp30 polypeptides

| | ECD | IgV |
|---|---|---|
| | SEQ ID | SEQ ID |
| Mutation(s) | NO | NO |
| Wild-type | 54 | 214 |
| L30V/A60V/S64P/S86G | 143 | 215 |
| L30V | 144 | 216 |
| A60V | 145 | 217 |
| S64P | 146 | 218 |
| S86G | 147 | 219 |

[0157] B. Transmembrane Domain

[0158] The transmembrane immunomodulatory proteins provided herein further contain a transmembrane domain linked to the ectodomain. In some embodiments, the transmembrane domain results in an encoded protein for cell surface expression on a cell. In some embodiments, the transmembrane domain is linked directly to the ectodomain. In some embodiments, the transmembrane domain is linked indirectly to the ectodomain via one or more linkers or spacers. In some embodiments, the transmembrane domain contains predominantly hydrophobic amino acid residues, such as leucine and valine.

[0159] In some embodiments, a full length transmembrane anchor domain can be used to ensure that the TIPs will be expressed on the surface of the engineered cell, such as engineered T cell. Conveniently, this could be from a particular native protein that is being affinity modified (e.g. CD80 or ICOSL or other native IgSF protein), and simply fused to the sequence of the first membrane proximal domain in a similar fashion as the native IgSF protein (e.g. CD80 or ICOSL). In some embodiments, the transmembrane immunomodulatory protein comprises a transmembrane domain of the corresponding wild-type or unmodified IgSF member, such as a transmembrane domain contained in the sequence of amino acids set forth in any of SEQ ID NOs:1-27 (see Table 1).

[0160] In some embodiments, the transmembrane domain is a non-native transmembrane domain that is not the transmembrane domain of the wild-type IgSF member. In some embodiments, the transmembrane domain is derived from a transmembrane domain from another non-IgSF family member polypeptide that is a membrane-bound or is a transmembrane protein. In some embodiments, a transmembrane anchor domain from another protein on T cells can be used. In some embodiments, the transmembrane domain is derived from CD8. In some embodiments, the transmembrane domain can further contain an extracellular portion of CD8 that serves as a spacer domain. An exemplary CD8 derived transmembrane domain is set forth in SEQ ID NO: 386 or a portion thereof containing the CD8 transmembrane domain. In some embodiments, the transmembrane domain is a synthetic transmembrane domain.

[0161] C. Endodomain

[0162] In some embodiments, the transmembrane immunomodulatory protein further contains an endodomain, such as a cytoplasmic signaling domain, linked to the transmembrane domain. In some embodiments, the cytoplasmic signaling domain induces cell signaling. In some embodiments, the endodomain of the transmembrane immunomodulatory protein comprises the cytoplasmic domain of the corresponding wild-type or unmodified polypeptide, such as a cytoplasmic domain contained in the sequence of amino acids set forth in any of SEQ ID NOS:1-27 (see Table 1).

[0163] In some embodiments, provided are CAR-related transmembrane immunomodulatory proteins in which the endodomain of a transmembrane immunomodulatory protein comprises a cytoplasmic signaling domain that comprises at least one ITAM (immunoreceptor tyrosine-based activation motif)-containing signaling domain. ITAM is a conserved motif found in a number of protein signaling domains involved in signal transduction of immune cells, including in the CD3-zeta chain (“CD3-z”) involved in T-cell receptor signal transduction. In some embodiments, the endodomain comprises at CD3-zeta signaling domain. In some embodiments, the CD3-zeta signaling domain comprises the sequence of amino acids set forth in SEQ ID NO: 387 or a sequence of amino acids that exhibits at least 85%, 86%, 87%, 88%, 89%, 90%, 91%, 92%, 93%, 94%, 95%, 96%, 97%, 98% or 99% to SEQ ID NO:387 and retains the activity of T cell signaling. In some embodiments, the endodomain of a CAR-related transmembrane immunomodulatory protein can further comprise a costimulatory signaling domain to further modulate immunomodulatory responses of the T-cell. In some embodiments, the costimulatory signaling domain is CD28, ICOS, 41BB or OX40. In some embodiments, the provided CAR-related transmembrane immunomodulatory proteins have features of CARs to stimulate T cell signaling upon binding of an affinity modified IgSF domain to a cognate binding partner or counter structure. In some embodiments, upon specific binding by the affinity-modified IgSF domain to its counter structure can lead to changes in the immunological activity of the T-cell activity as reflected by changes in cytotoxicity, proliferation or cytokine production.

[0164] In some embodiments, a CAR-related transmembrane immunomodulatory protein comprises an antigen binding region that is engineered to specifically bind to a desired counter-structure. In some embodiments, an affinity modified IgSF domain specifically binds its native counter-structure. In some embodiments the counter-structure is an IgSF family member. In some embodiments, provided is a CAR-related transmembrane immunomodulatory protein that specifically binds to a tumor specific IgSF counter-structure. In some embodiments, the antigen binding region (ectodomain) is an affinity modified IgSF domain NKp30. In some embodiments, the affinity modified IgSF domain specifically binds the tumor specific antigen NKp30 ligand B7-H6 (see, Levin et al., The Journal of Immunology, 2009, 182, 134.20). In examples of such embodiments, the endodomain comprises at least one ITAM (immunoreceptor tyrosine-based activation motif) containing signaling domain, such as a CD3-zeta signaling domain. In some embodiments, the endodomain can further comprises at least one of: a CD28 costimulatory domain, an OX40 signaling domain, and a 41BB signaling domain.

[0165] In some embodiments, the transmembrane immunomodulatory protein does not contain an endodomain capable of mediating cytoplasmic signaling. In some embodiments, the transmembrane immunomodulatory protein lacks the signal transduction mechanism of the wild-type or unmodified polypeptide and therefore does not itself induce cell signaling. In some embodiments, the transmembrane immunomodulatory protein lacks an intracellular (cytoplasmic) domain or a portion of the intracellular domain of the corresponding wild-type or unmodified polypeptide, such as a cytoplasmic signaling domain contained in the sequence of amino acids set forth in any of SEQ ID NOS:1-27 (see Table 1). In some embodiments, the transmembrane immunomodulatory protein does not contain an ITIM (immunoreceptor tyrosine-based inhibition motif), such as contained in certain inhibitory receptors, including inhibitory receptors of the IgSF family (e.g. PD-1 or TIGIT). Thus, in some embodiments, the transmembrane immunomodulatory protein only contains the ectodomain and the transmembrane domain, such as any as described.

[0166] D. Nucleic Acid Molecules and Vectors

[0167] Provided herein are isolated or recombinant nucleic acids collectively referred to as “nucleic acids” which encode any of the various provided embodiments of the transmembrane immunomodulatory polypeptides of the invention. Nucleic acids provided herein, including all described below, are useful in recombinant expression of the transmembrane immunomodulatory proteins, including for engineering cells. The nucleic acids provided herein can be in the form of RNA or in the form of DNA, and include mRNA, cRNA, recombinant or synthetic RNA and DNA, and cDNA. The nucleic acids of the invention are typically DNA molecules, and usually double-stranded DNA molecules. However, single-stranded DNA, single-stranded RNA, double-stranded RNA, and hybrid DNA/RNA nucleic acids or combinations thereof comprising any of the nucleotide sequences of the invention also are provided.

[0168] Also provided herein are expression vectors useful in engineering cells to express the transmembrane immunomodulatory proteins of the present invention. The immunomodulatory polypeptides provided herein can be introduced into cells using recombinant DNA techniques. To do so, a recombinant DNA molecule encoding a transmembrane immunomodulatory polypeptide is prepared. Methods of preparing such DNA molecules are well known in the art. For instance, sequences coding for the peptides could be excised from DNA using suitable restriction enzymes. Alternatively, the DNA molecule could be synthesized using chemical synthesis techniques, such as the phosphoramidite method. Also, a combination of these techniques could be used. In some instances, a recombinant or synthetic nucleic acid may be generated through polymerase chain reaction (PCR).

[0169] In some embodiments, a full length DNA insert can be generated comprising an optional endodomain (i.e., cytoplasmic domain), a transmembrane anchor domain, an optional spacer domain, an optional epitope tag, and finally one or more extracellular affinity modified IgSF domains. This DNA insert can be cloned into an appropriate T cell transduction/transfection vector as is known to those of skill in the art. Also provided are vectors containing the nucleic acid molecules.

[0170] In some embodiments, the expression vectors are capable of expressing the transmembrane immunomodulatory proteins in an appropriate cell under conditions suited to expression of the protein. In some aspects, an expression vector comprises the DNA molecule that codes for the transmembrane immunomodulatory protein operatively linked to appropriate expression control sequences. Methods of affecting this operative linking, either before or after the DNA molecule is inserted into the vector, are well known. Expression control sequences include promoters, activators, enhancers, operators, ribosomal binding sites, start signals, stop signals, cap signals, polyadenylation signals, and other signals involved with the control of transcription or translation. In some embodiments, a nucleic acid of the invention further comprises nucleotide sequence that encodes a secretory or signal peptide operably linked to the nucleic acid encoding the transmembrane immunomodulatory protein.

[0171] In some embodiments, the resulting expression vector having the DNA molecule thereon is used to transform, such as transduce, an appropriate cell. The introduction can be performed using methods well known in the art. Exemplary methods include those for transfer of nucleic acids encoding the receptors, including via viral, e.g., retroviral or lentiviral, transduction, transposons, and electroporation. In some embodiments, the expression vector is a viral vector. In some embodiments, the nucleic acid is transferred into cells by lentiviral or retroviral transduction methods.

[0172] E. Exemplary Transmembrane Immunomodulatory Proteins and Encoding Nucleic Acid Molecules

[0173] Provided herein is a transmembrane immunomodulatory protein in accord with the above description that comprises a sequence of amino acids that exhibits at least 85%, 86%, 87%, 88%, 89%, 90%, 91%, 92%, 93%, 94%, 95%, 96%, 97%, 98% or 99% sequence identity to any of SEQ ID NOS: 393-419 and contains an ectodomain comprising at least one affinity-modified IgSF domain as described and a transmembrane domain. In some embodiments, the transmembrane immunomodulatory protein can further comprise a cytoplasmic domain as described. In some embodiments, the transmembrane immunomodulatory protein can further contain a signal peptide. In some embodiments, the signal peptide is the native signal peptide of the corresponding wild-type IgSF member (see e.g. Table 1).

[0174] Also provided herein is a nucleic acid molecule encoding a transmembrane immunomodulatory protein comprising a nucleotide sequence that encodes a sequence of amino acids that exhibits at least 85%, 86%, 87%, 88%, 89%, 90%, 91%, 92%, 93%, 94%, 95%, 96%, 97%, 98% or 99% sequence identity to any of SEQ ID NOS: 393-419 and contains an ectodomain comprising at least one affinity-modified IgSF domain as described, a transmembrane domain and, optionally, a cytoplasmic domain. In some embodiments, the nucleic acid molecule can further comprise a sequence of nucleotides encoding a signal peptide. In some embodiments, the signal peptide is the native signal peptide of the corresponding wild-type IgSF member (see e.g. Table 1).

[0175] Exemplary of a transmembrane immunomodulatory protein is a CD80 TIP comprising i) the sequence of amino acids set forth in SEQ ID NO:381 or ii) a sequence of amino acids that exhibits at least 85%, 86%, 87%, 88%, 89%, 90%, 91%, 92%, 93%, 94%, 95%, 96%, 97%, 98% or 99% sequence identity to SEQ ID NO:381 and that comprises the affinity-modified domain of SEQ ID NO:381. Also provided is i) a sequence of nucleotides set forth in SEQ ID NO:382, ii) a sequence that exhibits at least 85%, 86%, 87%, 88%, 89%, 90%, 91%, 92%, 93%, 94%, 95%, 96%, 97%, 98% or 99% sequence identity to SEQ ID NO: 381 and that encodes a TIP that comprises the affinity-modified domain of SEQ ID NO:381, or iii) a sequence of i) or ii) having degenerate codons.

[0176] Exemplary of a transmembrane immunomodulatory protein is a ICOSL TIP comprising i) the sequence of amino acids set forth in SEQ ID NO:383 or ii) a sequence of amino acids that exhibits at least 85%, 86%, 87%, 88%, 89%, 90%, 91%, 92%, 93%, 94%, 95%, 96%, 97%, 98% or 99% sequence identity to SEQ ID NO:381 and that comprises the affinity-modified domain of SEQ ID NO:383. Also provided is i) a sequence of nucleotides set forth in SEQ ID NO:384, ii) a sequence that exhibits at least 85%, 86%, 87%, 88%, 89%, 90%, 91%, 92%, 93%, 94%, 95%, 96%, 97%, 98% or 99% sequence identity to SEQ ID NO: 384 and that encodes a TIP that comprises the affinity-modified domain of SEQ ID NO:383, or iii) a sequence of i) or ii) having degenerate codons.

### III. ENGINEERED CELLS

[0177] Provided herein are engineered cells expressing on their surface any of the provided transmembrane immunomodulatory polypeptide. In some embodiments, the transmembrane immunomodulatory protein is expressed on a lymphocyte such as a tumor infiltrating lymphocyte (TIL), T-cell or NK cell, or on a myeloid cell. In some embodiments, the engineered cells are antigen presenting cells (APCs). In some embodiments, the engineered cells are engineered mammalian T cells or engineered mammalian antigen presenting cells (APCs). In some embodiments, the engineered T-cells or APCs are human or murine cells.

[0178] In some embodiments, engineered T-cells include, but are not limited to, T helper cell, cytotoxic T-cell (alternatively, cytotoxic T lymphocyte or CTL), natural killer T-cell, regulatory T-cell, memory T-cell, or gamma delta T-cell. In some embodiments, the engineered T cells are CD4+ or CD8+. In addition to the signal of the MHC, engineered T-cells also require a co-stimulatory signal which in some embodiments is provided by the TIP as discussed previously.

[0179] In some embodiments, the engineered APCs include, for example, MHC II expressing APCs such as macrophages, B cells, and dendritic cells, as well as artificial APCs (aAPCs) including both cellular and acellular (e.g., biodegradable polymeric microparticles) aAPCs. Artificial APCs (aAPCs) are synthetic versions of APCs that can act in a similar manner to APCs in that they present antigens to T-cells as well as activate them. Antigen presentation is performed by the MHC (Class I or Class II). In some aspects, in engineered APCs such as aAPCs, the antigen that is loaded onto the MHC is, in some embodiments, a tumor specific antigen or a tumor associated antigen. The antigen loaded onto the MHC is recognized by a T-cell receptor (TCR) of a T cell, which, in some cases, can express one or more cognate binding partners or other molecule recognized by the affinity modified domain of the transmembrane immunomodulatory polypeptides provided herein. Materials which can be used to engineer an aAPC include: poly (glycolic acid), poly(lactic-co-glycolic acid), iron-oxide, liposomes, lipid bilayers, sepharose, and polystyrene.

[0180] In some embodiments, a transmembrane immunomodulatory protein provided herein is co-expressed or engineered into a cell that expresses an antigen-binding receptor, such as a recombinant receptor, such as a chimeric antigen receptor (CAR) or T cell receptor (TCR). In some embodiments, the engineered cell, such as an engineered T cell, recognizes a desired antigen associated with cancer, inflammatory and autoimmune disorders, or a viral infection. In specific embodiments, the antigen-binding receptor contains an antigen-binding moiety that specifically binds a tumor specific antigen or a tumor associated antigen. In some embodiments, the engineered T-cell is a CAR (chimeric antigen receptor) T-cell that contains an antigen-binding domain (e.g. scFv) that specifically binds to an antigen, such as a tumor specific antigen or tumor associated antigen. In another embodiment, the engineered T-cell possesses a TCR, including a recombinant or engineered TCR. In some embodiments, the TCR can be a native TCR. Those of skill in the art will recognize that generally native mammalian T-cell receptors comprise an alpha and a beta chain (or a gamma and a delta chain) involved in antigen specific recognition and binding. In some embodiments, the TCR is an engineered TCR that is modified. In some embodiments, the TCR of an engineered T-cell specifically binds to a tumor associated or tumor specific antigen presented by an APC. Thus, in some embodiments, the TIP protein is expressed in an engineered T-cell receptor cell or and engineered chimeric antigen receptor cell. In such embodiments, the engineered cell co-expresses the TIP and the CAR or TCR.

[0181] In some embodiments, transmembrane immunomodulatory polypeptides can be incorporated into engineered cells, such as engineered T cells or engineered APCs, by a variety of strategies such as those employed for recombinant host cells. A variety of methods to introduce a DNA construct into primary T cells are known in the art. In some embodiments, viral transduction or plasmid electroporation are employed. In typical embodiments, the nucleic acid molecule encoding the transmembrane immunomodulatory protein, or the expression vector, comprises a signal peptide that localizes the expressed transmembrane immunomodulatory proteins to the cellular membrane. In some embodiments, a nucleic acid encoding a transmembrane immunomodulatory proteins of the invention is sub-cloned into a viral vector, such as a retroviral vector, which allows expression in the host mammalian cell. The expression vector can be introduced into a mammalian host cell and, under host cell culture conditions, the TIP is expressed.

[0182] In an exemplary example, primary T cells can be purified ex vivo (CD4 cells or CD8 cells or both) and stimulated with an activation protocol consisting of various TCR/CD28 agonists, such as anti-CD3/anti-CD28 coated beads. After a 2 or 3 day activation process, the DNA vector containing a TIP of the present invention can be stably introduced into the primary T cells through art standard lentiviral or retroviral transduction protocols or plasmid electroporation strategies. Cells can be monitored for TIP expression by, for example, flow cytometry using anti-epitope tag or antibodies that cross-react with native parental molecule and affinity modified variant. T cells that express the TIP can be enriched through sorting with anti-epitope tag antibodies or enriched for high or low expression depending on the application.

[0183] Upon TIP expression the engineered T cell can be assayed for improved function by a variety of means. The engineered CAR or TCR co-expression can be validated to show that this part of the engineered T cell was not significantly impacted by the expression of the TIP construct. Once validated, standard in vitro cytotoxicity, proliferation, or cytokine assays can be used to assess the function of the engineered cells. Exemplary standard endpoints are percent lysis of the tumor line, proliferation of the engineered T-cell, or IFN-gamma protein expression in culture supernatants. An engineered construct which results in statistically significant increased lysis of tumor line, increased proliferation of the engineered T-cell, or increased IFN-gamma expression over the control construct can be selected for. Additionally, non-engineered cells, such as native primary or endogenous T-cells, could also be incorporated into the same in vitro assay to measure the ability of the TIP construct expressed on the engineered cells, such as engineered T-cells, to modulate activity, including, in some cases, to activate and generate effector function in bystander, native T-cells. Increased expression of activation markers such as CD69, CD44, or CD62L could be monitored on endogenous T cells, and increased proliferation and/or cytokine production could indicate desired activity of the TIP expressed on the engineered T cells.

[0184] In some embodiments, the similar assays can be used to compare the function of engineered T cells containing the CAR or TCR alone to those containing the CAR or TCR and a TIP construct. Typically, these in vitro assays are performed by plating various ratios of the engineered T cell and a “tumor” cell line containing the cognate CAR or TCR antigen together in culture. Standard endpoints are percent lysis of the tumor line, proliferation of the engineered T cell, or IFN-gamma production in culture supernatatants. An engineered TIP construct which resulted in statistically significant increased lysis of tumor line, increased proliferation of the engineered T cell, or increased IFN-gamma production over the same TCR or CAR construct alone can be selected for. Engineered human T cells can be analyzed in immunocompromised mice, like the NSG strain, which lacks mouse T, NK and B cells. Engineered human T cells in which the CAR or TCR binds a target counter-structure on the xenograft and is co-expressed with the TIP affinity modified IgSF domain can be adoptively transferred in vivo at different cell numbers and ratios compared to the xenograft. For example, engraftment of CD19+ leukemia tumor lines containing a luciferase/GFP vector can be monitored through bioluminescence or ex vivo by flow cytometry. In a common embodiment, the xenograft is introduced into the murine model, followed by the engineered T cells several days later. Engineered T cells containing the TIP can be assayed for increased survival, tumor clearance, or expanded engineered T cells numbers relative to engineered T cells containing the CAR or TCR alone. As in the in vitro assay, endogenous, native (i.e., non-engineered) human T cells could be co-adoptively transferred to look for successful epitope spreading in that population, resulting in better survival or tumor clearance.

[0185] Exemplary Functional Activities and Features

[0186] In some aspects, TIP-engineered cells, such as engineered lymphocytes (e.g. tumor infiltrating lymphocytes, T cells or NK cells) or myeloid cells (e.g. antigen presenting cells), exhibit one or more desirable features or activities.

[0187] In some embodiments, the affinity-modified IgSF domain, localized on the ectodomain of the TIP, specifically binds to at least one counter-structure expressed on a mammalian cell. In some embodiments, the mammalian cell is an autologous or allogeneic mouse, rat, cynomolgus monkey, or human cell. In some aspects, the mammalian cell can include such embodiments as an antigen presenting cell (APC), a tumor cell, or a T-cell. In some embodiments, the tumor cell is a mouse, rat, cynomolgus monkey, or human tumor cell. A TIP can comprise one or multiple (e.g., 2, 3, or 4) affinity modified IgSF domains. Thus, in some embodiments the TIP binds to no more than one counter-structure on the mammalian cell. In some embodiments, an affinity modified IgSF domain of a TIP specifically binds to no more than one counter-structure on the mammalian cell. Alternatively, in some embodiments, a TIP specifically binds to at least two, three or four, or exactly two, three, or four, counter-structures expressed on a mammalian cell. In some embodiments, the TIP specifically binds to no more than one cell surface counter-structure. Specific binding of the TIP affinity-modified IgSF domain to the counter-structure on a mammalian cell modulates immunological activity of the mammalian cell. Specific binding by and between an affinity modified IgSF domain and a mammalian cell counter-structure can be specific binding in cis arrangement (i.e., specific binding on the same cell) or in trans arrangement (i.e., specific binding on different cells) or in both cis and trans arrangement. Immunological activity of the cell can be increased as evidenced by increased, e.g., cell survival, cell proliferation, cytokine production, or T-cell cytotoxicity. In alternative embodiments, the immunological activity of the cell is attenuated as evidenced by a decrease of cell survival, cell proliferation, cytokine production, or T-cell cytotoxicity.

[0188] In some embodiments, at least one affinity modified IgSF domain present in a transmembrane immunomodulatory protein specifically binds to at least one cell surface counter-structure expressed on a mammalian cell and in which modulation of immunological activity is desired. In some embodiments, the counter-structure to which the affinity modified IgSF domain specifically binds is the native counter-structure of the wild type IgSF family member or wild type IgSF domain that has been affinity modified. In some embodiments, the specific binding increases and/or attenuates activity a mammalian cell expressing a cognate binding partner to which the affinity modified IgSF domain exhibits improved binding. Thus, by increasing specific binding affinity, the provided transmembrane immunomodulatory proteins can either increase or attenuate immunological activity of a mammalian cell. In some embodiments, the specific binding modulates, such as increases, immunological activity of the engineered cell with the transmembrane immunomodulatory protein.

[0189] In some embodiments, the counter-structure expressed on the mammalian cell is a mammalian IgSF member. The mammalian cell is, in some embodiments, an antigen presenting cell (APC), a lymphocyte, or a tumor cell. In some embodiments, the lymphocyte is a tumor infiltrating lymphocyte (TIL), an engineered or native T-cell, or an engineered or native NK cell. In some embodiments, the counter-structure of the affinity modified IgSF domain is a native human IgSF member. In some embodiments, the counter-structure is a “cell surface cognate binding partner” as indicated in Table 1.

[0190] In some embodiments, a TIP comprising an affinity modified IgSF when expressed on an immune cell, e.g. a lymphocyte such as a T-cell, can specifically bind at least one counter-structure expressed on a second immune cells, e.g. a lymphocyte such as a T-cell. The counter-structure on the second immune cells, e.g. second T-cell, can be an inhibitory counter-structure or a stimulatory counter-structure. Exemplary counter-structures include cell surface receptors or ligands. Examples of inhibitory receptors/ligands include PD-1/PD-L1, PD-L2, CTLA-4/B7-1/B7-2, BTLA/HVEM, LAGS/MHC class II, TIGIT/PVR, and TIM-3/CEACAM-1/GAL9. Examples of stimulatory receptors/ligands include CD28/B7-1/B7-2, ICOS/ICOSL, and CD226/PVR.

[0191] In some embodiments, the TIP is expressed on a lymphocyte or an NK cell that is in trans arrangement to the mammalian cell on which is expressed the counter-structure to which it specifically binds. In alternate embodiments it is in cis arrangement. In some embodiments, the TIP specifically binds to counter-structures that are cis and trans. In a particular embodiment, the TIP is expressed on a T-cell and comprises an affinity modified IgSF domain that specifically binds to a counter-structure expressed on a T-cell. In some embodiments the first and second T-cells are separate T-cells and in this embodiment the TIP and counter-structure are in trans to each other. In some embodiments, the TIP and counter-structure are expressed on the same T-cell and are cis to each other. In some embodiments, the TIP and counter-structure to which it specifically binds can be both cis and trans. In some embodiments, at least one of the T-cells is a native T-cell or an engineered T-cell. In some embodiments, the engineered T-cell is a chimeric antigen receptor (CAR) T-cell or a T-cell receptor (TCR) engineered T-cell.

[0192] In some embodiments, a transmembrane immunomodulatory protein comprises an affinity modified IgSF domain with increased affinity to a cell surface receptor to stimulate an increase in receptor signal transduction. Stimulating an increase in receptor signaling can in some embodiments increase immunological activity of that cell if, for example, the receptor is a stimulatory receptor that works to mediate those effects. In some cases, the inflammatory activity of the cell in which receptor signaling is stimulated is increased. In some embodiments, the transmembrane immunomodulatory protein increases the activity of a stimulatory receptor. In such examples, an IgSF domain of a transmembrane immunomodulatory protein can be affinity modified to increase the specific binding affinity to the native counter-structure on a mammalian cell, which, in some cases, is a stimulatory receptor. In some embodiments, the stimulatory receptor is a expressed on T cells. In certain embodiments, the affinity modified IgSF domain of the TIP, such as is expressed by a TIP-engineered cell (e.g. a first T cell), specifically binds to a stimulatory counter-structure expressed on a T cell (e.g. a second T cell) with increased affinity (relative to the non-affinity modified IgSF domain as a control). In certain embodiments, the affinity modified IgSF domain of the TIP specifically binds to a stimulatory counter-structure expressed on a T cell (e.g. second T cell) and increases immunomodulatory activity of the T-cell. In some embodiments, the affinity modified IgSF domain of a TIP binds to a stimulatory counter-structure on the T cell (e.g. second T-cell) with increased affinity and increases immunomodulatory activity of the T-cell.

[0193] In some embodiments, the stimulatory receptor is CD28, ICOS or CD226 and the transmembrane immunomodulatory protein is one that contains an ectodomain comprising an affinity-modified IgSF domain that exhibits increased binding affinity to one of CD28, ICOS or CD226 compared to a transmembrane protein containing a wild-type IgSF domain. In some embodiments, the affinity modified IgSF domain is an affinity modified domain of B7-1 (CD80). In some embodiments, an affinity modified CD80 (B7-1) IgSF domain of a TIP of the present invention is expressed on a first T-cell and is affinity modified to bind with increased affinity to the stimulatory counter-structure CD28 on the second T-cell. In some embodiments, the affinity modified IgSF domain is an affinity modified domain of ICOSL. In specific embodiments, the affinity modified IgSF domain is an affinity modified ICOSL (inducible costimulator ligand) domain and the stimulatory counter-structure is at least one of: ICOS (inducible costimulator) or CD28. In some embodiments, the ICOSL domain is affinity modified to specifically bind to both ICOS and CD28. In some embodiments, ICOSL is affinity modified to specifically bind to either ICOS or to CD28 but not both. In some embodiments, binding affinity to one of ICOS or CD28 is increased while binding affinity to the other is attenuated. In some embodiments, the affinity modified IgSF domain is an affinity modified CD155. In some embodiment, the affinity modified IgSF domain is an affinity modified CD112.

[0194] In some methods of the present invention, the transmembrane immunomodulatory protein attenuates the activity of an inhibitory receptor. In some cases, the increased binding affinity of the transmembrane immunomodulatory protein to a cognate cell surface molecule results in inhibition of specific binding between native counter-structures on mammalian cells. The greater affinity for that native counter-structure (relative to the competing affinity of the native IgSF member) attenuates specific binding affinity of native molecule to its counter-structure. Those of skill in the art will appreciate that antagonizing an inhibitory receptor signaling can in some embodiments attenuate immunological activity of that cell if, for example, the receptor is an inhibitory receptor that serves to cause those cellular effects.

[0195] Thus, in some embodiments, a TIP can be used to stimulate a cell on which the TIP is not expressed (i.e., the trans cell) while attenuating inhibition of the cell on which the TIP is expressed (the cis cell). For example, in some embodiments, the TIP comprises at least one affinity modified domain, and in some cases at least two affinity modified domains, that results in increased binding affinity to at least two cell surface cognate binding partners. In some embodiments, a first cognate binding partner is a stimulatory receptor and the second cell surface cognate binding partner is an inhibitory ligand of an inhibitory receptor. In some embodiments, binding of the affinity-modified domain to the inhibitory ligand competitively inhibits binding of the inhibitory ligand to the inhibitory receptor. In some embodiments, the stimulatory receptor and inhibitory receptor can independently be expressed on immune cells, such as T cells or antigen presenting cells. In some embodiments the stimulatory receptor is expressed on lymphocytes, such as T cells. In some embodiments, the inhibitory receptor is expressed on the TIP-engineered cells, such as an engineered T-cell. In some embodiments, the inhibitory receptor is PD-1, CTLA-4, LAG-3, TIGIT, CD96, CD112R, BTLA, CD160 or TIM-3 and/or the ligand of the inhibitory receptor is PD-L1, PD-L2, B7-1, B7-2, HVEM, MHC class II, PVR, CEACAM-1 or GAL9 (see e.g. Table 1). In some embodiments, the inhibitory counter-structure (i.e. inhibitory ligand and inhibitory receptor) is PD-L1 or PD-1.

[0196] In some embodiments, a TIP can be used to attenuate inhibition of the cell on which the TIP is expressed, such as a T cell in which the TIP is expressed. For example, a TIP expressed on a T cell (e.g. first T-cell) can comprise an affinity modified IgSF domain that inhibits specific binding between a counter-structure on a second T-cell and an inhibitory counter-structure (i.e. inhibitory receptor) expressed on the first T-cell. In some cases, this embodiment can be used independently or in conjunction with embodiments wherein an affinity modified IgSF domain of the invention is expressed on a first T-cell and specifically binds at least one stimulatory counter-structure expressed on a second T-cell and increases immunological activity in the second T-cell. By this mechanism, an increased immunomodulatory response is generated in the second T-cell by specific binding of the TIP expressed on the first T-cell to a stimulatory counter-structure on the second cell; and the second T-cell is inhibited from attenuating the immunomodulatory activity of the first T-cell by specific binding of an affinity modified IgSF domain expressed on the first T-cell that inhibits specific binding by and between a counter-structure on the second T-cell and an inhibitory counter-structure expressed on the first T-cell. The T-cells used in this and the preceding embodiments are generally murine or human T-cells although other mammalian T-cells can be employed. Often, cytotoxic T-cells (CTL) are used.

[0197] As previously noted, in some embodiments a TIP of the present invention is expressed on a first T-cell and comprises an affinity modified IgSF domain that specifically binds to a stimulatory counter-structure (e.g. stimulatory receptor) on a second T-cell while also inhibiting specific binding between a native counter-structure (e.g. inhibitory ligand) on the second T-cell to its inhibitory native counter-structure (e.g. inhibitory receptor) on the first T-cell. Inhibition of specific binding between the counter-structure on the second T-cell to the counter-structure on the first T-cell can be achieved by competitive binding of an affinity modified IgSF domain with at least one of the two native counter-structures such that their mutual binding is interfered with. Typically, the IgSF domain is affinity modified to have a higher binding affinity to its counter-structure than the native counter-structures have to each other. In some embodiments of this design, a TIP can comprise an affinity modified IgSF domain that binds to both the inhibitory and stimulatory counter-structures. Thus, in this embodiment the affinity-modified IgSF has dual binding capability. In some embodiments, a TIP comprises a first affinity-modified IgSF domain that binds a counter-structure on the first T-cell and a second affinity-modified IgSF domain that inhibits specific binding by and between the counter-structures on the first and second T-cells.

[0198] In yet another embodiment, the affinity modified IgSF domain that binds to the stimulatory counter-structure on the first T-cell is on a first TIP and the affinity modified IgSF domain that inhibits specific binding by and between the counter-structures on the first and second T-cells is on a second TIP. In this embodiment, the first and second TIP are different polypeptide chains. In some embodiments, the first affinity-modified IgSF domain and the second affinity-modified IgSF domain are the identical affinity-modified IgSF domain. For example, in a specific embodiment the ICOSL (inducible costimulator ligand) IgSF domain (e.g. affinity modified IgV domain) is affinity modified to specifically bind with increased affinity to both ICOS and CD28. In some embodiments, the affinity modified IgSF domain is an affinity modified ICOSL IgSF domain (e.g. affinity modified IgV domain) with increased affinity to both ICOS and CD28, or decreased affinity to one of or both of: ICOS and CD28.

[0199] In some embodiments, the transmembrane immunomodulatory proteins results in inhibition of specific binding by and between native counter-structures. In some embodiments, this can be achieved by an affinity-modified IgSF domain having greater affinity for one or both native counter-structures thereby competitively inhibiting the specific binding by and between these counter-structures.

[0200] In some embodiments, the TIP comprises an affinity modified IgSF domain that is an affinity modified CD155 IgSF domain with increased affinity to CD226 and attenuated affinity to TIGIT (T-cell immunoreceptor with Ig and ITIM domains).

[0201] In some embodiments, the TIP (e.g. expressed on a first T cell) comprises an affinity modified CD80 (97-1) IgSF domain that is affinity modified to bind with increased affinity to the stimulatory counter-structure CD28 (e.g. on a second T-cell). Additionally, in this embodiment, the affinity modified CD80 (97-1) domain can bind with increased affinity to PD-L1 (e.g. expressed on the second T-cell) and inhibit specific binding to its PD-1 counter-structure (e.g. expressed on the first T-cell). In yet a further addition either of the preceding embodiments, the affinity modified CD80 (B7-1) domain can be affinity modified such that it does not substantially specifically bind to CTLA-4 or binds with attenuated affinity and therefore is not significantly inhibited in its specific binding to the stimulatory counter-structure CD28 by CTLA-4.

[0202] In some embodiments, a transmembrane immunomodulatory protein (TIP) can be used as a decoy counter-structure to inhibit specific binding by and between native counter-structures, at least one of which comprises an IgSF family member. In some cases, specific binding of a TIP comprising an affinity modified IgSF domain with one of the native counter-structures inhibits mutual specific binding by and between the native counter-structures (e.g. native receptor and ligand pairs). Thus, in some embodiments, TIPs can attenuate specific binding by means of competitive or non-competitive binding. In some embodiments, the native counter-structure is a cell surface receptor, which can be a stimulatory receptor or an inhibitory receptor. Embodiments wherein specific binding of the affinity modified IgSF domain of a TIP increases or attenuates immunological activity of the T-cell are included within the scope of the invention.

[0203] In some embodiments, a native counter-structure is an inhibitory counter-structure that acts to attenuate immunological activity when specifically bound by its native counter-structure. For example, a native cell surface counter-structure expressed on an antigen presenting cell (APC) or a mammalian tumor cell can specifically bind a native inhibitory counter-structure on an NK cell or a lymphocyte such as a T-cell. Specific binding to the inhibitory counter-structure acts to attenuate immunomodulatory activity of the NK cell or lymphocyte on which the inhibitory counter-structure is expressed.

[0204] In some embodiments, an inhibitory counter-structure is an inhibitory receptor. In some embodiments, the inhibitory counter-structure is an ITIM (immunoreceptor tyrosine-based inhibition motif) containing inhibitory counter-structure. The ITIM motif is found in the endodomain of many inhibitory receptors of the immune system (Cell Signal, 16 (4): 435-456, 2004). In some embodiments, the affinity modified domain is an affinity modified form of a wild-type inhibitory receptor that results in greater affinity of the affinity modified domain of the TIP for its native binding partner than the wild-type inhibitory receptor for the native binding partner. Thus, in these embodiments a TIP can attenuate the inhibitory response of ITIM motif receptors by specific binding of the TIP affinity modified IgSF domain to its native IgSF domain counter-structure, such as specific binding of the TIP affinity modified IgSF domain to the ITIM containing inhibitory receptor. As an example, an ITIM containing counter-structure is PD-1. Typically, PD-1 is the inhibitory receptor that is specifically bound to the inhibitory ligand PD-1. Upon specific binding of PD-L1 to PD-1, PD-1 is involved in inhibiting T-cell activation via signal transduction from the ITIM domain.

[0205] In some embodiments, the inhibitory receptor counter-structure is PD-1, CTLA-4, LAG3, TIGIT, TIM-3, or BTLA. In some embodiments, the TIP contains an affinity-modified domain that is an affinity-modified IgSF domain of PD-1, CTLA-4, LAG3, TIGIT, TIM-3, or BTLA that binds with greater affinity to the native inhibitory ligand of the inhibitory receptor than the wild-type inhibitory receptor (see Table 1 for ligand binding partners of exemplary inhibitory receptors). In some embodiments, a TIP can comprise an affinity modified PD-1 IgSF domain that binds with greater affinity to PD-L1 than wild-type PD-1. Specific binding can be achieved by competitive or non-competitive binding and are specific embodiments of the invention. Competitive binding by and between the affinity modified IgSF domain and the counter-structure (i.e. inhibitory receptor, e.g. PD-1) inhibits its binding to its native ligand counter-structure (e.g., PD-L1). In some embodiments, the TIP of this embodiment substantially lacks the signal transduction mechanism of the wild-type inhibitory receptor and therefore does not itself induce an inhibitory response.

### IV. COMPOSITIONS, METHODS AND THERAPEUTIC APPLICATIONS

[0206] Provided herein are compositions and methods related to the provided transmembrane immunomodulatory proteins and engineered cells thereof for use in modulating immunological activity of a mammalian cell. The compositions can be used in associated methods to, for example, modulate immunological activity in an immunotherapy approach to the treatment of, for example, a mammalian cancer or, in other embodiments the treatment of autoimmune disorders. The methods employed generally comprise a method of contacting a TIP of the present invention with a mammalian cell under conditions that are permissive to specific binding of the affinity modified IgSF domain and modulation of the immunological activity of the mammalian cell. The methods can be employed ex vivo or in vivo. In some embodiments, the method of modulating immunological activity is achieved by expression of a TIP of the present invention on a lymphocyte (e.g., a T-cell or TIL) or NK cell engineered to express the TIP. The cell expressing the TIP is contacted with a mammalian cell such as an APC, a second lymphocyte or tumor cell under conditions that are permissive of specific binding of the affinity modified IgSF domain to a counter-structure on the mammalian cell such that immunological activity can be modulated in the mammalian cell. In some embodiments, the methods is conducted by adoptive cell transfer wherein cells expressing the TIP (e.g., a T-cell) are infused back into the patient.

[0207] Provided herein are methods of administering a therapeutic amount of a cell composition containing the provided transmembrane immunomodulatory proteins to a subject having a disease or disorder. The pharmaceutical compositions described herein can be used in a variety of therapeutic applications, such as the treatment of a disease. For example, in some embodiments the pharmaceutical composition is used to treat inflammatory or autoimmune disorders, cancer, organ transplantation, viral infections, and/or bacterial infections in a mammal. The pharmaceutical composition can modulate an immune response to treat the disease. For example, in some embodiments, the pharmaceutical composition stimulates the immune response, which can be useful, for example, in the treatment of cancer, viral infections, or bacterial infections. In some embodiments, the pharmaceutical composition suppresses an immune response, which can be useful in the treatment of inflammatory or autoimmune disorders, or organ transplantation.

[0208] The provided methods are believed to have utility in a variety of applications, including, but not limited to, e.g., in prophylactic or therapeutic methods for treating a variety of immune system diseases or conditions in a mammal in which modulation or regulation of the immune system and immune system responses is beneficial. For example, suppressing an immune response can be beneficial in prophylactic and/or therapeutic methods for inhibiting rejection of a tissue, cell, or organ transplant from a donor by a recipient. In a therapeutic context, the mammalian subject is typically one with an immune system disease or condition, and administration is conducted to prevent further progression of the disease or condition.

[0209] Cell compositions expressing transmembrane immunomodulatory proteins of the present invention and associated methods can be used in immunotherapy applications. In some embodiments, engineered cells for expression of a transmembrane immunomodulatory protein (TIP) are cells isolated from a mammal, such as a mouse or human. In some embodiments, the mammalian cell serving as a host cell for expression of a TIP is a lymphocyte such as a tumor infiltrating lymphocyte (TIL), a natural killer (NK) cell, or a T-cell such as a CD8+ cytotoxic T lymphocyte or a CD4+ helper T lymphocyte. In some embodiments, the cells are autologous cells. In aspects of the provided method, the engineered cells are contacted, generally under physiological conditions, with a mammalian cell in which modulation of immunological activity is desired. For example, the mammalian cell can be a murine or human cell such as an antigen presenting cell or tumor cell. In some embodiments, the engineered cells are autologous cells. In other embodiments, the cells are allogeneic. Cells can be contacted in vivo or ex vivo. In some embodiments, the engineered cells are administered to the subject, such as by infusion. Thus, composition and methods can be used in adoptive cell transfer immunotherapy.

[0210] In some embodiments, an effective amount of a pharmaceutical composition is administered to inhibit, halt, or reverse progression of cancers that are sensitive to modulation of immunological activity by transmembrane immunomodulatory proteins of the present invention. In some embodiments, the methods of the invention are used in the treatment of a mammalian patient of cancers such as lymphoma, lymphoid leukemia, myeloid leukemia, cervical cancer, neuroblastoma, or multiple myeloma. Other cancers which can be treated by the methods of the invention include, but are not limited to, melanoma, bladder cancer, hematological malignancies (leukemia, lymphoma, myeloma), liver cancer, brain cancer, renal cancer, breast cancer, pancreatic cancer (adenocarcinoma), colorectal cancer, lung cancer (small cell lung cancer and non-small-cell lung cancer), spleen cancer, cancer of the thymus or blood cells (i.e., leukemia), prostate cancer, testicular cancer, ovarian cancer, uterine cancer, gastric carcinoma, or Ewing's sarcoma.

[0211] Human cancer cells can be treated in vivo, or ex vivo. In ex vivo treatment of a human patient, tissue or fluids containing cancer cells are treated outside the body and then the tissue or fluids are reintroduced back into the patient. In some embodiments, the cancer is treated in a human patient in vivo by administration of the therapeutic composition into the patient. Thus, the present invention provides ex vivo and in vivo methods to inhibit, halt, or reverse progression of the tumor, or otherwise result in a statistically significant increase in progression-free survival (i.e., the length of time during and after treatment in which a patient is living with cancer that does not get worse), or overall survival (also called “survival rate;” i.e., the percentage of people in a study or treatment group who are alive for a certain period of time after they were diagnosed with or treated for cancer) relative to treatment with a control.

[0212] In some embodiments, a pharmaceutical composition of the invention can also be used to inhibit growth of mammalian, particularly human, cancer cells as a monotherapy (i.e., as a single agent), in combination with at least one chemotherapeutic agent (i.e., a combination therapy), in combination with a cancer vaccine, in combination with an immune checkpoint inhibitor and/or in combination with radiation therapy. In some aspects of the present disclosure, the immune checkpoint inhibitor is nivolumab, tremelimumab, pembrolizumab, ipilimumab, or the like.

[0213] In some embodiments, the provided compositions can attenuate an immune response, such as, for example, where the transmembrane immunomodulatory protein comprises an affinity modified IgSF domain of an inhibitory ligand. In some embodiments, the compositions can be used to treat an autoimmune disease. In some embodiments, the administration of a therapeutic composition of the invention to a subject suffering from an immune system disease (e.g., autoimmune disease) can result in suppression or inhibition of such immune system attack or biological responses associated therewith. By suppressing this immune system attack on healthy body tissues, the resulting physical symptoms (e.g., pain, joint inflammation, joint swelling or tenderness) resulting from or associated with such attack on healthy tissues can be decreased or alleviated, and the biological and physical damage resulting from or associated with the immune system attack can be decreased, retarded, or stopped. In a prophylactic context, the subject may be one with, susceptible to, or believed to present an immune system disease, disorder or condition, and administration is typically conducted to prevent progression of the disease, disorder or condition, inhibit or alleviate symptoms, signs, or biological responses associated therewith, prevent bodily damage potentially resulting therefrom, and/or maintain or improve the subject's physical functioning.

[0214] In some embodiments, the pharmaceutical compositions comprising cells engineered with TIPs can be used to treat one or more other immune disease or disorder in the subject. The immune system disease or disorder of the patient may be or involve, e.g., but is not limited to, Addison's Disease, Allergy, Alopecia Areata, Alzheimer's, Antineutrophil cytoplasmic antibodies (ANCA)-associated vasculitis, Ankylosing Spondylitis, Antiphospholipid Syndrome (Hughes Syndrome), arthritis, Asthma, Atherosclerosis, Atherosclerotic plaque, autoimmune disease (e.g., lupus, RA, MS, Graves' disease, etc.), Autoimmune Hemolytic Anemia, Autoimmune Hepatitis, Autoimmune inner ear disease, Autoimmune Lymphoproliferative syndrome, Autoimmune Myocarditis, Autoimmune Oophoritis, Autoimmune Orchitis, Azoospermia, Behcet's Disease, Berger's Disease, Bullous Pemphigoid, Cardiomyopathy, Cardiovascular disease, Celiac Sprue/Coeliac disease, Chronic Fatigue Immune Dysfunction Syndrome (CFIDS), Chronic idiopathic polyneuritis, Chronic Inflammatory Demyelinating, Polyradicalneuropathy (CIPD), Chronic relapsing polyneuropathy (Guillain-Barré syndrome), Churg-Strauss Syndrome (CSS), Cicatricial Pemphigoid, Cold Agglutinin Disease (CAD), COPD, CREST syndrome, Crohn's disease, Dermatitis, Herpetiformus, Dermatomyositis, diabetes, Discoid Lupus, Eczema, Epidermolysis bullosa acquisita, Essential Mixed Cryoglobulinemia, Evan's Syndrome, Exopthalmos, Fibromyalgia, Goodpasture's Syndrome, graft-related disease or disorder, Graves′Disease, GVHD, Hashimoto's Thyroiditis, Idiopathic Pulmonary Fibrosis, Idiopathic Thrombocytopenia Purpura (ITP), IgA Nephropathy, immunoproliferative disease or disorder (e.g., psoriasis), Inflammatory bowel disease (IBD), Insulin Dependent Diabetes Mellitus (IDDM), Interstitial lung disease, juvenile diabetes, Juvenile Arthritis, juvenile idiopathic arthritis (JIA), Kawasaki's Disease, Lambert-Eaton Myasthenic Syndrome, Lichen Planus, lupus, Lupus Nephritis, Lymphoscytic Lypophisitis, Ménèire's Disease, Miller Fish Syndrome/acute disseminated encephalomyeloradiculopathy, Mixed Connective Tissue Disease, Multiple Sclerosis (MS), muscular rheumatism, Myalgic encephalomyelitis (ME), Myasthenia Gravis, Ocular Inflammation, Pemphigus Foliaceus, Pemphigus Vulgaris, Pernicious Anaemia, Polyarteritis Nodosa, Polychondritis, Polyglandular Syndromes (Whitaker's syndrome), Polymyalgia Rheumatica, Polymyositis, Primary Agammaglobulinemia, Primary Biliary Cirrhosis/Autoimmune cholangiopathy, Psoriasis, Psoriatic arthritis, Raynaud's Phenomenon, Reiter's Syndrome/Reactive arthritis, Restenosis, Rheumatic Fever, rheumatic disease, Rheumatoid Arthritis, Sarcoidosis, Schmidt's syndrome, Scleroderma, Sjörgen's Syndrome, Solid-organ transplant rejection (kidney, heart, liver, lung, etc.), Stiff-Man Syndrome, Systemic Lupus Erythematosus (SLE), systemic scleroderma, Takayasu Arteritis, Temporal Arteritis/Giant Cell Arteritis, Thyroiditis, Type 1 diabetes, Type 2 diabetes, Ulcerative colitis, Uveitis, Vasculitis, Vitiligo, Wegener's Granulomatosis, and preventing or suppressing an immune response associated with rejection of a donor tissue, cell, graft, or organ transplant by a recipient subject. Graft-related diseases or disorders include graft versus host disease (GVDH), such as associated with bone marrow transplantation, and immune disorders resulting from or associated with rejection of organ, tissue, or cell graft transplantation (e.g., tissue or cell allografts or xenografts), including, e.g., grafts of skin, muscle, neurons, islets, organs, parenchymal cells of the liver, etc. With regard to a donor tissue, cell, graft or solid organ transplant in a recipient subject, it is believed that a therapeutic composition of the invention disclosed herein may be effective in preventing acute rejection of such transplant in the recipient and/or for long-term maintenance therapy to prevent rejection of such transplant in the recipient (e.g., inhibiting rejection of insulin-producing islet cell transplant from a donor in the subject recipient suffering from diabetes).

[0215] In some embodiments, a therapeutic amount of the pharmaceutical composition is administered. Typically, precise amount of the compositions of the present invention to be administered can be determined by a physician with consideration of individual differences in age, weight, tumor size, extent of infection or metastasis, and condition of the patient (subject). It can generally be stated that a pharmaceutical composition comprising engineered cells, e.g. T cells, as described herein may be administered at a dosage of 10⁴ to 10⁹ cells/kg body weight, such as 10⁵ to 10⁶ cells/kg body weight, including all integer values within those ranges. Engineered cell compositions, such as T cell compositions, may also be administered multiple times at these dosages. The cells can be administered by using infusion techniques that are commonly known in immunotherapy (see, e.g., Rosenberg et al, New Eng. J. of Med. 319: 1676, 1988). The optimal dosage and treatment regime for a particular patient can readily be determined by one skilled in the art of medicine by monitoring the patient for signs of disease and adjusting the treatment accordingly.

[0216] The administration of the subject compositions may be carried out in any convenient manner, including by aerosol inhalation, injection, ingestion, transfusion, implantation or transplantation. The compositions described herein may be administered to a patient subcutaneously, intradermally, intratumorally, intranodally, intramedullary, intramuscularly, by intravenous (i.v.) injection, or intraperitoneally. In one embodiment, the therapeutic composition is administered to a patient by intradermal or subcutaneous injection. In another embodiment, the therapeutic compositions is administered by i.v. injection. In some cases, the cell compositions may be injected directly into a tumor, lymph node, or site of infection.

### Pharmaceutical Formulation

[0217] Provided are pharmaceutical compositions containing the transmembrane immunomodulatory proteins, including engineered cells expressing such transmembrane immunomodulatory proteins. In some embodiments, the pharmaceutical compositions and formulations include one or more optional pharmaceutically acceptable carrier or excipient.

[0218] Such compositions may comprise buffers such as neutral buffered saline, phosphate buffered saline and the like; carbohydrates such as glucose, mannose, sucrose or dextrans, mannitol; proteins; polypeptides or amino acids such as glycine; antioxidants; chelating agents such as EDTA or glutathione; adjuvants (e.g., aluminum hydroxide); and preservatives. Compositions of the present invention are preferably formulated for intravenous administration.

[0219] Pharmaceutical compositions of the present invention may be administered in a manner appropriate to the disease to be treated (or prevented). The quantity and frequency of administration will be determined by such factors as the condition of the patient, and the type and severity of the patient's disease, although appropriate dosages may be determined by clinical trials.

[0220] Such a formulation may, for example, be in a form suitable for intravenous infusion. A pharmaceutically acceptable carrier may be a pharmaceutically acceptable material, composition, or vehicle that is involved in carrying or transporting cells of interest from one tissue, organ, or portion of the body to another tissue, organ, or portion of the body. For example, the carrier may be a liquid or solid filler, diluent, excipient, solvent, or encapsulating material, or some combination thereof. Each component of the carrier must be “pharmaceutically acceptable” in that it must be compatible with the other ingredients of the formulation. It also must be suitable for contact with any tissue, organ, or portion of the body that it may encounter, meaning that it must not carry a risk of toxicity, irritation, allergic response, immunogenicity, or any other complication that excessively outweighs its therapeutic benefits.

[0221] An effective amount of a pharmaceutical composition to be employed therapeutically will depend, for example, upon the therapeutic context and objectives. One skilled in the art will appreciate that the appropriate dosage levels for treatment will thus vary depending, in part, upon the molecule delivered, the indication for which the binding agent molecule is being used, the route of administration, and the size (body weight, body surface or organ size) and condition (the age and general health) of the patient. Accordingly, the clinician may titer the dosage and modify the route of administration to obtain the optimal therapeutic effect. The pharmaceutical composition of the invention can be administered parentally, subcutaneously, or intravenously, or as described elsewhere herein. The pharmaceutical composition of the invention may be administered in a therapeutically effective amount one, two, three or four times per month, two times per week, biweekly (every two weeks), or bimonthly (every two months). Administration may last for a period of 1, 2, 3, 4, 5, 6, 7, 8, 9, 10, 11, or 12 months or longer (e.g., one, two, three, four or more years, including for the life of the subject).

[0222] For any composition, the therapeutically effective dose can be estimated initially either in cell culture assays or in animal models such as mice, rats, rabbits, dogs, pigs, or monkeys. An animal model may also be used to determine the appropriate concentration range and route of administration. Such information can then be used to determine useful doses and routes for administration in humans. The exact dosage will be determined in light of factors related to the subject requiring treatment. Dosage and administration are adjusted to provide sufficient levels of the cell composition or to maintain the desired effect. Factors that may be taken into account include the severity of the disease state, the general health of the subject, the age, weight, and gender of the subject, time and frequency of administration, drug combination(s), reaction sensitivities, and response to therapy. Appropriate dosages may be ascertained through use of appropriate dose-response data. A number of biomarkers or physiological markers for therapeutic effect can be monitored including T cell activation or proliferation, cytokine synthesis or production (e.g., production of TNF-α, IFN-γ, IL-2), induction of various activation markers (e.g., CD25, IL-2 receptor), inflammation, joint swelling or tenderness, serum level of C-reactive protein, anti-collagen antibody production, and/or T cell-dependent antibody response(s).

[0223] A variety of means are known for determining if administration of a therapeutic composition of the invention sufficiently modulates immunological activity by eliminating, sequestering, or inactivating immune cells mediating or capable of mediating an undesired immune response; inducing, generating, or turning on immune cells that mediate or are capable of mediating a protective immune response; changing the physical or functional properties of immune cells; or a combination of these effects. Examples of measurements of the modulation of immunological activity include, but are not limited to, examination of the presence or absence of immune cell populations (using flow cytometry, immunohistochemistry, histology, electron microscopy, polymerase chain reaction (PCR)); measurement of the functional capacity of immune cells including ability or resistance to proliferate or divide in response to a signal (such as using T cell proliferation assays and pepscan analysis based on 3H-thymidine incorporation following stimulation with anti-CD3 antibody, anti-T cell receptor antibody, anti-CD28 antibody, calcium ionophores, PMA, antigen presenting cells loaded with a peptide or protein antigen; B cell proliferation assays); measurement of the ability to kill or lyse other cells (such as cytotoxic T cell assays); measurements of the cytokines, chemokines, cell surface molecules, antibodies and other products of the cells (e.g., by flow cytometry, enzyme-linked immunosorbent assays, Western blot analysis, protein microarray analysis, immunoprecipitation analysis); measurement of biochemical markers of activation of immune cells or signaling pathways within immune cells (e.g., Western blot and immunoprecipitation analysis of tyrosine, serine or threonine phosphorylation, polypeptide cleavage, and formation or dissociation of protein complexes; protein array analysis; DNA transcriptional, profiling using DNA arrays or subtractive hybridization); measurements of cell death by apoptosis, necrosis, or other mechanisms (e.g., annexin V staining, TUNEL assays, gel electrophoresis to measure DNA laddering, histology; fluorogenic caspase assays, Western blot analysis of caspase substrates); measurement of the genes, proteins, and other molecules produced by immune cells (e.g., Northern blot analysis, polymerase chain reaction, DNA microarrays, protein microarrays, 2-dimensional gel electrophoresis, Western blot analysis, enzyme linked immunosorbent assays, flow cytometry); and measurement of clinical symptoms or outcomes such as improvement of autoimmune, neurodegenerative, and other diseases involving self proteins or self polypeptides (clinical scores, requirements for use of additional therapies, functional status, imaging studies) for example, by measuring relapse rate or disease severity (using clinical scores known to the ordinarily skilled artisan) in the case of multiple sclerosis, measuring blood glucose in the case of type I diabetes, or joint inflammation in the case of rheumatoid arthritis.

### V. EXEMPLARY EMBODIMENTS

[0224] Among the provided embodiments are:

[0225] 1. A transmembrane immunomodulatory protein (TIP) comprising:
[0226] (i) an ectodomain comprising at least one non-immunoglobulin affinity-modified immunoglobulin superfamily (IgSF) domain comprising one or more amino acid substitution(s) in a wild-type IgSF domain, wherein the at least one affinity-modified IgSF domain specifically binds at least one cell surface cognate binding partner of the wild-type IgSF domain; and
[0227] (ii) a transmembrane domain.

[0228] 2. The transmembrane immunomodulatory protein of embodiment 1, wherein the at least one cell surface cognate binding partner is expressed on a mammalian cell.

[0229] 3. The transmembrane immunomodulatory protein of embodiment 2, wherein the mammalian cell is an antigen presenting cell (APC), a tumor cell, or a lymphocyte, which optionally is a T-cell.

[0230] 4. The transmembrane immunomodulatory protein of any of embodiments 1-3, wherein the mammalian cell is a mouse, rat, cynomolgus monkey, or human cell.

[0231] 5. The transmembrane immunomodulatory protein of any of embodiments 1-4, wherein the at least one affinity modified IgSF domain has increased binding affinity to the at least one cell surface cognate binding partner compared with the reference wild-type IgSF domain.

[0232] 6. The transmembrane immunomodulatory protein of any of embodiments 2-5, wherein specific binding of the transmembrane immunomodulatory protein comprising the at least one affinity-modified IgSF domain modulates immunological activity of the mammalian cell compared with the reference transmembrane domain comprising the wild-type IgSF domain.

[0233] 7. The transmembrane immunomodulatory protein of any of embodiments 2-6, wherein specific binding of the transmembrane immunomodulatory protein comprising the at least one affinity-modified IgSF domain increases immunological activity of the mammalian cell compared with the reference transmembrane domain comprising the wild-type IgSF domain.

[0234] 8. The transmembrane immunomodulatory protein of any of embodiments 2-6, wherein specific binding of the transmembrane immunomodulatory protein attenuates immunological activity of the mammalian cell compared with the reference transmembrane domain comprising the wild-type IgSF domain.

[0235] 9. The transmembrane protein of any of embodiments 1-8, wherein the wild-type IgSF domain is from an IgSF family member of a family selected from Signal-Regulatory Protein (SIRP) Family, Triggering Receptor Expressed On Myeloid Cells Like (TREML) Family, Carcinoembryonic Antigen-related Cell Adhesion Molecule (CEACAM) Family, Sialic Acid Binding Ig-Like Lectin (SIGLEC) Family, Butyrophilin Family, B7 family, CD28 family, V-set and Immunoglobulin Domain Containing (VSIG) family, V-set transmembrane Domain (VSTM) family, Major Histocompatibility Complex (MHC) family, Signaling lymphocytic activation molecule (SLAM) family, Leukocyte immunoglobulin-like receptor (LIR), Nectin (Nec) family, Nectin-like (NECL) family, Poliovirus receptor related (PVR) family, Natural cytotoxicity triggering receptor (NCR) family, T cell immunoglobulin and mucin (TIM) family or Killer-cell immunoglobulin-like receptors (KIR) family.

[0236] 10. The transmembrane immunomodulatory protein of any of embodiments 1-9, wherein the wild-type IgSF domain is from an IgSF member selected from CD80, CD86, PD-L1, PD-L2, ICOS Ligand, B7-H3, B7-H4, CD28, CTLA4, PD-1, ICOS, BTLA, CD4, CD8-alpha, CD8-beta, LAG3, TIM-3, CEACAM1, TIGIT, PVR, PVRL2, CD226, CD2, CD160, CD200, CD200R or Nkp30.

[0237] 11. The transmembrane immunomodulatory protein of any of embodiments 1-10, wherein the wild-type IgSF domain is a human IgSF member.

[0238] 12. The transmembrane immunomodulatory protein of any of embodiments 1-11, wherein the at least one affinity modified IgSF domain has at least 90% sequence identity to a wild-type IgSF domain or a specific binding fragment thereof contained in the sequence of amino acids set forth in any of SEQ ID NOS: 1-54.

[0239] 13. The transmembrane immunomodulatory protein of any of embodiments 1-12, wherein the transmembrane immunomodulatory protein has at least 90% sequence identity to the amino acid sequence selected from any of SEQ ID NOS: 393-419.

[0240] 14. The transmembrane immunomodulatory protein of any of embodiments 1-13, wherein the at least one cell surface cognate binding partner is a stimulatory receptor expressed on a T-cell and the at least one affinity-modified IgSF domain has increased binding affinity to the stimulatory receptor compared to the affinity of the wild-type IgSF domain.

[0241] 15. The transmembrane immunomodulatory protein of embodiment 14, wherein binding of the affinity-modified IgSF domain to the stimulatory receptor increases immunological activity of the T-cell.

[0242] 16. The transmembrane immunomodulatory protein of embodiment 14 or embodiment 15, wherein the stimulatory receptor is CD28, ICOS or CD226.

[0243] 17. The transmembrane immunomodulatory protein of any one of embodiments 14-16, wherein the at least one affinity-modified IgSF domain is an affinity modified B7-1 IgSF domain o and the stimulatory receptor is CD28.

[0244] 18. The transmembrane immunomodulatory protein of any one of embodiments 14-16, wherein the at least one affinity-modified IgSF domain is an affinity modified ICOSL IgSF domain o and the stimulatory receptor is ICOS.

[0245] 19. The transmembrane immunomodulatory protein of any one of embodiments 14-16, wherein the affinity-modified IgSF domain is an affinity modified ICOSL IgSF domain and the stimulatory receptor is CD28.

[0246] 20. The transmembrane immunomodulatory protein of any one of embodiments 14-16, 18 and 19, wherein the at least one affinity-modified IgSF domain is an affinity-modified ICOSL IgSF domain that has increased binding affinity to at least one of: ICOS and CD28.

[0247] 21. The transmembrane immunomodulatory protein of any one of embodiments 14-16- and 18-20, wherein the affinity modified IgSF domain is an affinity modified ICOSL IgV IgSF domain with increased binding affinity to both ICOS and CD28.

[0248] 22. The transmembrane immunomodulatory protein of any one of embodiments 17-21, wherein the affinity-modified IgSF domain does not substantially specifically bind to CTLA-4 or exhibits decreased binding affinity to CTLA-4 compared to the wild-type IgSF domain.

[0249] 23. The transmembrane immunomodulatory protein of any of embodiments 1-22, wherein the at least one affinity-modified IgSF domain specifically binds to no more than one cell surface cognate binding partner.

[0250] 24. The transmembrane immunomodulatory protein of any of embodiments 1-23, wherein the transmembrane immunomodulatory protein specifically binds to no more than one cell surface cognate binding partner.

[0251] 25. The transmembrane immunomodulatory protein of any of embodiments 1-22, wherein the at least one affinity-modified domain specifically binds to at least two cell surface cognate binding partners.

[0252] 26. The transmembrane immunomodulatory protein of embodiment 25, wherein:

[0253] the first cell surface cognate binding partner is a stimulatory receptor expressed on a T cell; and

[0254] the second cell surface cognate binding partner is an inhibitory ligand of an inhibitory receptor, wherein the inhibitory receptor is expressed on a T-cell.

[0255] 27. The transmembrane immunomodulatory protein of embodiment 26, wherein binding of the affinity-modified domain to the inhibitory ligand competitively inhibits binding of the inhibitory ligand to the inhibitory receptor.

[0256] 28. The transmembrane immunomodulatory protein of embodiment 26 or embodiment 27, wherein:

[0257] the inhibitory receptor is PD-1, CTLA-4, LAG-3, TIGIT, CD96, CD112R, BTLA, CD160 or TIM-3; or

[0258] the ligand of the inhibitory receptor is PD-L1, PD-L2, B7-1, B7-2, HVEM, MHC class II, PVR, CEACAM-1 or GAL9.

[0259] 29. The transmembrane immunomodulatory protein of any one of embodiments 26-28, wherein the affinity modified IgSF domain is an affinity modified B7-1 domain and the stimulatory receptor is CD28.

[0260] 30. The transmembrane immunomodulatory protein of embodiment 29, wherein the inhibitory ligand is PD-L1 and the inhibitory receptor is PD-1.

[0261] 31. The transmembrane immunomodulatory protein of embodiment 29 or embodiment 30, wherein the affinity-modified IgSF domain exhibits decreased binding affinity to CTLA-4 compared to the wild-type IgSF domain for CTLA-4.

[0262] 32. The transmembrane immunomodulatory protein of any one of embodiments 29-31, wherein the affinity-modified IgSF domain does not substantially specifically bind to CTLA-4.

[0263] 33. The transmembrane immunomodulatory protein of any of embodiments 1-13, wherein the affinity modified IgSF domain is an affinity modified CD155 IgSF domain or an affinity modified CD112 IgSF domain and the stimulatory receptor is CD226.

[0264] 34. The transmembrane immunomodulatory protein of embodiment 33, wherein the affinity-modified IgSF domain exhibits decreased binding affinity to TIGIT (T-cell immunoreceptor with Ig and ITIM domains) compared to the affinity of the wild-type IgSF domain.

[0265] 35. The transmembrane immunomodulatory protein of any of embodiments 1-13, wherein the at least one affinity-modified IgSF domain specifically binds to a cell surface cognate binding partner that is a tumor specific antigen.

[0266] 36. The transmembrane immunomodulatory protein of embodiment 35, wherein the tumor specific antigen is B7-H6.

[0267] 37. The transmembrane immunomodulatory protein of embodiment 35 or embodiment 36, wherein the affinity modified IgSF domain is an affinity modified Nkp30 IgSF domain.

[0268] 38. The transmembrane immunomodulatory protein of any one of embodiments 1-37, wherein the at least one affinity-modified IgSF domain is a first affinity-modified IgSF domain and the ectodomain comprises a second affinity-modified IgSF domain.

[0269] 39. The transmembrane immunomodulatory protein of embodiment 38, wherein the first and second affinity-modified IgSF domain are different.

[0270] 40. The transmembrane immunomodulatory protein of embodiment 38 or embodiment 39, wherein the first affinity-modified IgSF domain and the second affinity-modified IgSF domain each comprise one or more amino acid different substitutions in the same wild-type IgSF domain.

[0271] 41. The transmembrane immunomodulatory protein of embodiment 38 or embodiment 39, wherein the first affinity-modified IgSF domain and the second affinity-modified IgSF domain each comprise one or more amino acid substitutions in a different wild-type IgSF domain.

[0272] 42. The transmembrane immunomodulatory protein of any of embodiments 1-41, wherein the transmembrane immunomodulatory protein further comprises an endodomain or cytoplasmic signaling domains.

[0273] 43. The transmembrane immunomodulatory protein of embodiment 42, wherein the endodomain is the endodomain from the wild-type IgSF member comprising the wild-type IgSF domain or is a functionally active portion thereof.

[0274] 44. The transmembrane immunomodulatory protein of embodiment 42, wherein the transmembrane immunomodulatory protein is a chimeric receptor, wherein the endodomain is not the endodomain from the wild-type IgSF member comprising the wild-type IgSF domain.

[0275] 45. The transmembrane immunomodulatory protein of embodiment 42 or embodiment 44, wherein the endodomain comprises at least one ITAM (immunoreceptor tyrosine-based activation motif)-containing signaling domain.

[0276] 46. The transmembrane immunomodulatory protein of any of embodiments 42, 44 and 45, wherein the endodomain comprises a CD3-zeta signaling domain.

[0277] 47. The transmembrane immunomodulatory protein of embodiment 45 or embodiment 46, wherein the endodomain further comprises at least one of: a CD28 costimulatory domain, an ICOS signaling domain, an OX40 signaling domain, and a 41BB signaling domain.

[0278] 48. The transmembrane immunomodulatory protein of any of embodiments 1-13, wherein the wild-type IgSF domain is from an IgSF member that is an inhibitory receptor comprising an ITIM signaling domain.

[0279] 49. The transmembrane immunomodulatory protein of embodiment 48, wherein the inhibitory receptor is PD-1, CTLA-4, LAG3, TIGIT, TIM-3, or BTLA and the at least one affinity-modified IgSF domain is an affinity-modified IgSF domain of PD-1, CTLA-4, LAG3, TIGIT, TIM-3, or BTLA, respectively.

[0280] 50. The transmembrane immunomodulatory protein of embodiment 48 or embodiment 49, wherein the inhibitory receptor is PD-1 and the at least one affinity-modified IgSF domain is an affinity-modified IgSF of PD-1.

[0281] 51. The transmembrane immunomodulatory protein of any of embodiments 48-50, wherein the affinity-modified IgSF domain has increased binding affinity for a trans surface cognate binding partner compared to the wildtype IgSF domain, whereby the increased binding affinity competitively inhibits binding of the trans surface cognate binding partner to the inhibitory receptor.

[0282] 52. The transmembrane immunomodulatory protein of any of embodiments 48-51, wherein the transmembrane immunomodulatory protein does not comprise an endodomain, ITIM or cytoplasmic signaling domains.

[0283] 53. The transmembrane immunomodulatory protein of any of embodiments 1-52, wherein the affinity modified IgSF domain differs by no more than ten amino acid substitutions from the wildtype IgSF domain.

[0284] 54. The transmembrane immunomodulatory protein of any of embodiments 1-53, wherein the affinity modified IgSF domain differs by no more than five amino acid substitutions from the wildtype IgSF domain.

[0285] 55. The transmembrane immunomodulatory protein of any of embodiments 1-54, wherein the affinity-modified IgSF domain is or comprises an affinity modified IgV domain, affinity modified IgC1 domain or an affinity modified IgC2 domain or is a specific binding fragment thereof comprising the one or more amino acid substitutions.

[0286] 56. The transmembrane immunomodulatory protein of any of embodiments 1-55, wherein the ectodomain further comprises one or more non-affinity modified IgSF domains.

[0287] 57. The transmembrane immunomodulatory protein of embodiment 56, wherein the one or more non-affinity modified IgSF domains is from a wild-type IgSF member comprising the wild-type IgSF domain.

[0288] 58. The transmembrane immunomodulatory protein of any of embodiments 1-57, wherein the transmembrane domain is the native transmembrane domain from the corresponding wild-type IgSF member.

[0289] 59. The transmembrane immunomodulatory protein of any of embodiments 1-57, wherein the transmembrane domain is not the native transmembrane domain from the corresponding wild-type IgSF member.

[0290] 60. The transmembrane immunomodulatory protein of embodiment 59, wherein the transmembrane protein is a transmembrane protein derived from CD8.

[0291] 61. A recombinant nucleic acid encoding a transmembrane immunomodulatory proteins of any of embodiments 1-60.

[0292] 62. A recombinant expression vector comprising the nucleic acid of embodiment 61.

[0293] 63. A recombinant host cell comprising the expression vector of embodiment 62.

[0294] 64. A recombinant host cell comprising the nucleic acid of embodiment 61.

[0295] 65. The recombinant host cell of embodiment 63 or embodiment 64, wherein the host cell is a mammalian host cell.

[0296] 66. The recombinant host cell of any of embodiments 63-65, wherein the mammalian host cell is a human host cell.

[0297] 67. An engineered cell comprising the transmembrane immunomodulatory protein of any of embodiments 1-60.

[0298] 68. The engineered cell of embodiment 67, wherein the cell is an immune cell.

[0299] 69. The engineered cell of embodiment 67 or embodiment 68, wherein the cell is a lymphocyte.

[0300] 70. The engineered cell of embodiment 69, wherein the lymphocyte is a T cell, a B cell or an NK cell.

[0301] 71. The engineered cell of any of embodiments 67-70, wherein the cell is a T cell.

[0302] 72. The engineered cell of embodiment 71, wherein the T cells is CD4+ or CD8+.

[0303] 73. The engineered cell of embodiment 67 or embodiment 68, wherein the cell is an antigen presenting cell.

[0304] 74. The engineered cell of any of embodiments 67-73, further comprising a chimeric antigen receptor (CAR) or an engineered T-cell receptor (TCR).

[0305] 75. A pharmaceutical composition comprising the cell of any of embodiments 67-74 and a pharmaceutically acceptable carrier.

[0306] 76. The pharmaceutical composition of embodiment 75 that is sterile.

[0307] 77. A method of modulating an immune response in a mammalian subject, comprising administering a cell of any of embodiments 67-74 or a pharmaceutical composition of embodiment 75 or embodiment 76 to the subject.

[0308] 78. The method of embodiment 76 or embodiment 77, wherein modulating the immune response treats a disease or disorder in the subject.

[0309] 79. The method of any of embodiments 77-78, wherein the modulated immune response is increased.

[0310] 80. The method of embodiment 78 or embodiment 79, wherein the disease or disorder is a tumor.

[0311] 81. The method of any of embodiments 78-80, wherein the disease or disorder is a cancer.

[0312] 82. The method of any of embodiments 78-81, wherein the disease or disorder is melanoma, lung cancer, bladder cancer, or a hematological malignancy.

[0313] 83. The method of any of embodiments 77-78, wherein the modulated immune response is decreased.

[0314] 84. The method of embodiment 78 or embodiment 83, wherein the disease or disorder is an inflammatory disease or condition.

[0315] 85. The method of any of embodiments 78, 83 and 84, wherein the disease or condition is Crohn's disease, ulcerative colitis, multiple sclerosis, asthma, rheumatoid arthritis, or psoriasis.

[0316] 86. The method of any of embodiments 77-85, wherein the subject is human.

[0317] 87. The method of any of embodiments 77-86, wherein the cell is autologous to the subject.

[0318] 88. The method of any of embodiments 77-87, wherein the cell is allogenic to the subject.

[0319] 89. A transmembrane immunomodulatory protein (TIP) comprising:
[0320] an ectodomain, wherein the ectodomain comprises at least one non-immunoglobulin affinity-modified immunoglobulin superfamily (IgSF) domain; and
[0321] a transmembrane domain, wherein: the TIP is expressed on a first T-cell; the affinity-modified IgSF domain specifically binds at least one counter-structure expressed on a mammalian cell; the mammalian cell is an antigen presenting cell (APC), a tumor cell, or a second T-cell; and specific binding of the affinity-modified IgSF domain to a counter-structure modulates immunological activity of the mammalian cell.

[0322] 90. The transmembrane immunomodulatory protein (TIP) of embodiment 89, wherein:
[0323] the TIP comprises a first affinity-modified IgSF domain, wherein the counter-structure expressed on the mammalian cell is a stimulatory counter-structure expressed on the second T-cell; and
[0324] the first affinity-modified IgSF domain specifically binds to the stimulatory counter-structure and increases immunomodulatory activity of the second T-cell.

[0325] 91. The transmembrane immunomodulatory protein of embodiment 90, further comprising a second affinity-modified IgSF domain expressed on the first T-cell that competitively inhibits specific binding of a counter-structure expressed on the second T-cell to its inhibitory counter-structure expressed on the first T-cell.

[0326] 92. The transmembrane immunomodulatory protein of embodiment 91, wherein the first affinity modified IgSF domain is an affinity modified B7-1 domain and the stimulatory counter-structure is CD28.

[0327] 93. The transmembrane immunomodulatory protein of embodiment 92, wherein the counter-structure expressed on the second T-cell is PD-L1 and the inhibitory counter-structure expressed on the first T-cell is PD-1.

[0328] 94. The transmembrane immunomodulatory protein (TIP) according to embodiments 92 or 93, wherein the first affinity-modified IgSF domain does not substantially specifically bind to CTLA-4.

[0329] 95. The transmembrane immunomodulatory protein of embodiment 90, wherein the first affinity-modified IgSF domain is an affinity modified ICOSL domain and the stimulatory counter-structure is ICOS.

[0330] 96. The transmembrane immunomodulatory protein of embodiment 90, wherein the first affinity-modified IgSF domain is an affinity modified ICOSL domain and the stimulatory counter-structure is CD28.

[0331] 97. The transmembrane immunomodulatory protein of embodiment 90, wherein the first affinity-modified IgSF domain has increased affinity to the stimulatory counter-structure.

[0332] 98. The transmembrane immunomodulatory protein (TIP) of embodiment 91, wherein the TIP ectodomain comprises both the first affinity-modified IgSF domain and the second affinity-modified IgSF domain.

[0333] 99. The transmembrane immunomodulatory protein of embodiment 98, wherein the first affinity-modified IgSF domain and the second affinity-modified IgSF domain are the identical affinity-modified IgSF domain.

[0334] 100. The transmembrane immunomodulatory protein of embodiment 91, wherein at least one of the first and second T-cell is a native T-cell or an engineered T-cell.

[0335] 101. The transmembrane immunomodulatory protein of embodiment 91, wherein the engineered T-cell is a chimeric antigen receptor (CAR) or a T-cell receptor (TCR) engineered T-cell.

[0336] 102. The transmembrane immunomodulatory protein of embodiment 90, wherein the first affinity modified IgSF domain is an ICOSL (inducible costimulator ligand) IgV IgSF domain with increased affinity to at least one of: ICOS and CD28.

[0337] 103. The transmembrane immunomodulatory protein of embodiment 90, wherein the first affinity modified IgSF domain is an affinity modified ICOSL IgV IgSF domain with increased affinity to both ICOS and CD28.

[0338] 104. The transmembrane immunomodulatory protein of embodiment 91, wherein the first affinity modified IgSF domain is a CD155 IgSF domain with increased affinity to CD226 and attenuated affinity to TIGIT (T-cell immunoreceptor with Ig and ITIM domains).

[0339] 105. The transmembrane immunomodulatory protein of embodiment 89, wherein the mammalian cell is an autologous cell.

[0340] 106. The transmembrane immunomodulatory protein of embodiment 89, wherein the mammalian cell is an allogenic cell.

[0341] 107. The transmembrane immunomodulatory protein of embodiment 89, wherein the mammalian cell is a mouse, rat, cynomolgus monkey, or human cell.

[0342] 108. The transmembrane immunomodulatory protein of embodiment 89, further comprising an endodomain or cytoplasmic signaling domains.

[0343] 109. The transmembrane immunomodulatory protein of embodiment 89, wherein the affinity-modified IgSF domain specifically binds to the counter-structure on the mammalian cell with increased affinity.

[0344] 110. The transmembrane immunomodulatory protein of embodiment 109, wherein immunological activity of the mammalian cell is increased.

[0345] 111. The transmembrane immunomodulatory protein of embodiment 89, wherein immunological activity of the mammalian cell is attenuated.

[0346] 112. The transmembrane immunomodulatory protein of embodiment 89, wherein the affinity modified IgSF domain differs by no more than ten amino acid substitutions from the native IgSF domain.

[0347] 113. The transmembrane immunomodulatory protein of embodiment 89, wherein the affinity modified IgSF domain differs by no more than five amino acid substitutions from the native IgSF domain.

[0348] 114. The transmembrane immunomodulatory protein of embodiment 89, wherein the affinity modified IgSF domain specifically binds to no more than one counter-structure.

[0349] 115. The transmembrane immunomodulatory protein (TIP) of embodiment 89, wherein the TIP specifically binds to no more than one cell surface counter-structure.

[0350] 116. The transmembrane immunomodulatory protein of embodiment 89, wherein the affinity modified IgSF domain specifically binds to at least two cell surface counter-structures.

[0351] 117. The transmembrane immunomodulatory protein of embodiment 89, wherein the affinity modified IgSF domain is an affinity modified IgV, IgC1, or IgC2 domain.

[0352] 118. The transmembrane immunomodulatory protein of embodiment 89, wherein the affinity-modified IgSF domain has increased binding affinity for a first counter-structure expressed on a mammalian cell, whereby the increased binding affinity competitively inhibits binding of the first counter-structure to a second counter-structure.

[0353] 119. The transmembrane immunomodulatory protein of embodiment 118, wherein the second counter-structure is a cell surface receptor.

[0354] 120. The transmembrane immunomodulatory protein of embodiment 119, wherein the cell surface receptor is an inhibitory receptor.

[0355] 121. The transmembrane immunomodulatory protein of embodiment 120, wherein the inhibitory receptor is PD-1 and the affinity-modified IgSF domain is a PD-1 IgSF domain.

[0356] 122. The transmembrane immunomodulatory protein of embodiment 118, wherein the second counter-structure is PD-1, CTLA-4, LAG3, TIGIT, TIM-3, or BTLA.

[0357] 123. The transmembrane immunomodulatory protein (TIP) of embodiment 118, wherein the TIP increases immunological activity of the T-cell.

[0358] 124. The transmembrane immunomodulatory protein (TIP) of embodiment 89, wherein the TIP is a chimeric antigen receptor (CAR), and wherein the affinity-modified IgSF domain specifically binds to a tumor specific IgSF counter-structure.

[0359] 125. The transmembrane immunomodulatory protein of embodiment 124, wherein the CAR endodomain comprises a CD3-zeta signaling domain.

[0360] 126. The transmembrane immunomodulatory protein of embodiment 124, wherein the CAR endodomain comprises at least one CD3 ITAM (immunoreceptor tyrosine-based activation motif).

[0361] 127. The transmembrane immunomodulatory protein of embodiment 125, wherein the CAR endodomain further comprises at least one of: a CD28 costimulatory domain, an OX40 signaling domain, and a 41BB signaling domain.

[0362] 128. The transmembrane immunomodulatory protein of embodiment 124, wherein the affinity modified IgSF domain specifically binds the tumor specific antigen B7-H6.

[0363] 129. The transmembrane immunomodulatory protein according to embodiments 89, 90, or 91, wherein the transmembrane immunomodulatory protein has at least 90% sequence identity with an amino acid sequence selected from SEQ ID NOS: 1-26.

[0364] 130. The transmembrane immunomodulatory protein according to embodiments 89, 90, or 91, wherein the transmembrane immunomodulatory protein has at least 95% sequence identity with an amino acid sequence selected from SEQ ID NOS: 1-26.

[0365] 131. A recombinant nucleic acid encoding any one of the transmembrane immunomodulatory proteins of embodiments 89 to 130.

[0366] 132. A recombinant expression vector comprising a nucleic acid according to embodiment 131.

[0367] 133. A recombinant host cell comprising the expression vector of embodiment 132.

[0368] 134. The recombinant host cell of embodiment 133, wherein the host cell is a mammalian host cell.

[0369] 135. The recombinant host cell of embodiment 133 wherein the mammalian host cell is a human host cell.

[0370] 136. A method of treating a mammalian patient in need of an enhanced or inhibited immunological response by administering a therapeutically effective amount of a transmembrane immunomodulatory protein of any one of embodiments 89 to 130.

[0371] 137. The method of embodiment 136, wherein the enhanced immunological response treats melanoma, lung cancer, bladder cancer, or a hematological malignancy in the patient.

[0372] 138. The method of embodiment 136, wherein the inhibited immunological response treats Crohn's disease, ulcerative colitis, multiple sclerosis, asthma, rheumatoid arthritis, or psoriasis in the patient.

### VI. EXAMPLES

[0373] The following examples are included for illustrative purposes only and are not intended to limit the scope of the invention.

[0374] Examples 1-10 describe the design, creation, and screening of affinity modified CD80 (B7-1), CD86 (B7-2), ICOSL, and NKp30 immunomodulatory proteins, which are components of the immune synapse (IS) that have a demonstrated dual role in both immune activation and inhibition. These examples demonstrate that affinity modification of IgSF domains yields proteins that can act to both increase and decrease immunological activity. This work also describes the various combinations of those domains fused in pairs (i.e., stacked) to form a Type II immunomodulatory protein to achieve immunomodulatory activity. Example 11 further exemplifies such domains in a transmembrane immunomodulatory protein (TIP) format and the generation of engineered cells co-expressing the TIP with a chimeric antigen receptor (CAR).

### Example 1

### Generation of Mutant DNA Constructs of IgSF Domains

[0375] Example 1 describes the generation of mutant DNA constructs of human CD80, CD86, ICOSL and NKp30 IgSF domains for translation and expression on the surface of yeast as yeast display libraries.

[0376] A. Degenerate Libraries

[0377] For libraries that target specific residues of target protein for complete or partial randomization with degenerate codons, the coding DNAs for the extracellular domains (ECD) of human CD80 (SEQ ID NO:28), ICOSL (SEQ ID NO:32), and NKp30 (SEQ ID NO:54) were ordered from Integrated DNA Technologies (Coralville, Iowa) as a set of overlapping oligonucleotides of up to 80 base pairs (bp) in length. To generate a library of diverse variants of each ECD, the oligonucleotides contained desired degenerate codons at desired amino acid positions. Degenerate codons were generated using an algorithm at the URL: rosettadesign.med.unc.edu/SwiftLib/.

[0378] In general, positions to mutate and degenerate codons were chosen from crystal structures (CD80, NKp30) or homology models (ICOSL) of the target-ligand pairs of interest were used to identify ligand contact residues as well as residues that are at the protein interaction interface. This analysis was performed using a structure viewer available at the URL:spdbv.vital-it.ch). For example, a crystal structure for CD80 bound to CTLA4 is publicly available at the URL:www.rcsb.org/pdb/explore/explore.do?structureId=1I8L and a targeted library was designed based on the CD80::CTLA4 interface for selection of improved binders to CTLA4. However, there are no CD80 structures available with ligands CD28 and PDL1, so the same library was also used to select for binders of CD28 (binds the same region on CD80 as CTLA4) and PDL1 (not known if PDL1 binds the same site as CTLA4). The next step in library design was the alignment of human, mouse, rat and monkey CD80, ICOSL or NKp30 sequences to identify conserved residues. Based on this analysis, conserved target residues were mutated with degenerate codons that only specified conservative amino acid changes plus the wild-type residue. Residues that were not conserved were mutated more aggressively, but also including the wild-type residue. Degenerate codons that also encoded the wild-type residue were deployed to avoid excessive mutagenesis of target protein. For the same reason, only up to 20 positions were targeted for mutagenesis at a time. These residues were a combination of contact residues and non-contact interface residues.

[0379] The oligonucleotides were dissolved in sterile water, mixed in equimolar ratios, heated to 95° C. for five minutes and slowly cooled to room temperature for annealing. ECD-specific oligonucleotide primers that anneal to the start and end of the ECDs, respectively, were then used to generate PCR product. The ECD-specific oligonucleotides which overlap by 40-50 bp with a modified version of pBYDS03 cloning vector (Life Technologies USA), beyond and including the BamH1 and Kpn1 cloning sites, were then used to amplify 100 ng of PCR product from the prior step to generate a total of 5 μg of DNA. Both PCR's were by polymerase chain reaction (PCR) using OneTaq 2×PCR master mix (New England Biolabs, USA). The second PCR products were purified using a PCR purification kit (Qiagen, Germany) and resuspended in sterile deionized water. To prepare for library insertion, a modified yeast display version of vector pBYDS03 was digested with BamH1 and Kpn1 restriction enzymes (New England Biolabs, USA) and the large vector fragment was gel-purified and dissolved in sterile, deionized water. Electroporation-ready DNA for the next step was generated by mixing 12 μg of library DNA with 4 μg of linearized vector in a total volume of 50 μl deionized and sterile water. An alternative way to generate targeted libraries was to carry out site-directed mutagenesis (Multisite kit, Agilent, USA) of target ECDs with oligonucleotides containing degenerate codons. This approach was used to generate sublibraries that only target specific stretches of the DNA for mutagenesis. In these cases, sublibraries were mixed before proceeding to the selection steps. In general, library sizes were in the range of 10E7 to 10E8 clones, except that sublibraries were only in the range of 10E4 to 10E5. Large libraries and sublibraries were generated for CD80, ICOSL, CD86 and NKp30. Sublibraries were generated for CD80, ICOSL and NKp30.

[0380] B. Random Libraries

[0381] Random libraries were also constructed to identify variants of the ECD of CD80 (SEQ ID NO:28), CD86 (SEQ ID NO: 29), ICOSL (SEQ ID NO:32) and NKp30 (SEQ ID NO:54. DNA encoding wild-type ECDs was cloned between the BamH1 and Kpn1 sites of modified yeast display vector pBYDS03 and then released using the same restriction enzymes. The released DNA was then mutagenized with the Genemorph II kit (Agilent, USA) so as to generate an average of three to five amino acid changes per library variant. Mutagenized DNA was then amplified by the two-step PCR and further processed as described above for targeted libraries.

### Example 2

### Introduction of DNA Libraries into Yeast

[0382] Example 2 describes the introduction of CD80, CD86, ICOSL and NKp30 DNA libraries into yeast.

[0383] To introduce degenerate and random library DNA into yeast, electroporation-competent cells of yeast strain BJ5464 (ATCC.org; ATCC number 208288) were prepared and electroporated on a Gene Pulser II (Biorad, USA) with the electroporation-ready DNA from the step above essentially as described (Colby, D. W. et al. 2004 Methods Enzymology 388, 348-358). The only exception is that transformed cells were grown in non-inducing minimal selective SCD-Leu medium to accommodate the LEU2 selective marker carried by modified plasmid pBYDS03.

[0384] Library size was determined by plating dilutions of freshly recovered cells on SCD-Leu agar plates and then extrapolating library size from the number of single colonies from plating that generated at least 50 colonies per plate. The remainder of the electroporated culture was grown to saturation and cells from this culture were subcultured into the same medium once more to minimize the fraction of untransformed cells. To maintain library diversity, this subculturing step was carried out using an inoculum that contained at least 10× more cells than the calculated library size. Cells from the second saturated culture were resuspended in fresh medium containing sterile 25% (weight/volume) glycerol to a density of 10E10/ml and frozen and stored at −80° C. (frozen library stock).

[0385] One liter of SCD-Leu media consists of 14.7 grams of sodium citrate, 4.29 grams of citric acid monohydrate, 20 grams of dextrose, 6.7 grams of Difco brand yeast nitrogen base, and 1.6 grams yeast synthetic drop-out media supplement without leucine. Media was filtered sterilized before use using a 0.2 μM vacuum filter device.

[0386] Library size was determined by plating dilutions of freshly recovered cells on SCD-Leu agar plates and then extrapolating library size from the number of single colonies from a plating that generate at least 50 colonies per plate.

[0387] To segregate plasmid from cells that contain two or more different library clones, a number of cells corresponding to 10 times the library size, were taken from the overnight SCD-Leu culture and subcultured 1/100 into fresh SCD-Leu medium and grown overnight. Cells from this overnight culture were resuspended in sterile 25% (weight/volume) glycerol to a density of 10E10/ml and frozen and stored at −80° C. (frozen library stock).

### Example 3

### Yeast Selection

[0388] Example 3 describes the selection of yeast expressing affinity modified variants of CD80, CD86, ICOSL and NKp30.

[0389] A number of cells equal to at least 10 times the library size were thawed from individual library stocks, suspended to 0.1×10E6 cells/ml in non-inducing SCD-Leu medium, and grown overnight. The next day, a number of cells equal to 10 times the library size were centrifuged at 2000 RPM for two minutes and resuspended to 0.5×10E6 cells/ml in inducing SCDG-Leu media. One liter of the SCDG-Leu induction media consists of 5.4 grams Na₂HPO₄, 8.56 grams of NaH₂PO₄*H₂O, 20 grams galactose, 2.0 grams dextrose, 6.7 grams Difco yeast nitrogen base, and 1.6 grams of yeast synthetic drop out media supplement without leucine dissolved in water and sterilized through a 0.22 μm membrane filter device. The culture was grown for two days at 20° C. to induce expression of library proteins on the yeast cell surface.

[0390] Cells were processed with magnetic beads to reduce non-binders and enrich for all CD80, CD86, ICOSL or NKp30 variants with the ability to bind their exogenous recombinant counter-structure proteins (cognate binding partners). For example, yeast displayed targeted or random CD80 libraries were selected against each of CD28, CTLA-4, PD-L1. ICOSL libraries were selected against ICOS and CD28 and NKp30 libraries were selected against B7-H6. This was then followed by two to three rounds of fluorescence activated cell sorting (FACS) using exogenous counter-structure protein staining to enrich the fraction of yeast cells that displays improved binders. Magnetic bead enrichment and selections by flow cytometry are essentially as described in Keith D. Miller, 1 Noah B. Pefaur, 2 and Cheryl L. Baird1 Current Protocols in Cytometry 4.7.1-4.7.30, July 2008.

[0391] With CD80, CD86, ICOSL, and NKp30 libraries, target ligand proteins were sourced from R&D Systems (USA) as follows: human rCD28.Fc (i.e., recombinant CD28-Fc fusion protein), rPDL1.Fc, rCTLA4.Fc, rICOS.Fc, and rB7H6.Fc. Magnetic streptavidin beads were obtained from New England Biolabs, USA. For biotinylation of counter-structure protein, biotinylation kit cat#21955, Life Technologies, USA, was used. For two-color, flow cytometric sorting, a Becton Dickinson FACS Aria II sorter was used. CD80, CD86, ICOSL, or NKp30 display levels were monitored with an anti-hemagglutinin tag antibody labeled with Alexafluor 488 (Life Technologies, USA). Ligand binding Fc fusion proteins rCD28.Fc, rCTLA4.Fc, rPDL1.Fc, rICOS.Fc, or rB7-H6.Fc were detected with PE conjugated human Ig specific goat Fab (Jackson ImmunoResearch, USA). Doublet yeast were gated out using forward scatter (FSC)/side scatter (SSC) parameters, and sort gates were based upon higher ligand binding detected in FL2 that possessed more limited HA tag expression binding in FL1.

[0392] Yeast outputs from the flow cytometric sorts were assayed for higher specific binding affinity. Sort output yeast were expanded and re-induced to express the particular IgSF affinity modified domain variants they encode. This population then can be compared to the parental, wild-type yeast strain, or any other selected outputs, such as the bead output yeast population, by flow cytometry.

[0393] For ICOSL, the second sort outputs (F2) were compared to parental ICOSL yeast for binding of each rICOS.Fc, rCD28.Fc, and rCTLA4.Fc by double staining each population with anti-HA (hemagglutinin) tag expression and the anti-human Fc secondary to detect ligand binding.

[0394] In the case of ICOSL yeast variants selected for binding to ICOS, the F2 sort outputs gave Mean Fluorescence Intensity (MFI) values of 997, when stained with 5.6 nM rICOS.Fc, whereas the parental ICOSL strain MFI was measured at 397 when stained with the same concentration of rICOS.Fc. This represents a roughly three-fold improvement of the average binding in this F2 selected pool of clones, and it is predicted that individual clones from that pool will have much better improved MFI/affinity when individually tested.

[0395] In the case of ICOSL yeast variants selected for binding to CD28, the F2 sort outputs gave MFI values of 640 when stained with 100 nM rCD28.Fc, whereas the parental ICOSL strain MFI was measured at 29 when stained with the same concentration of rCD28.Fc (22-fold improvement). In the case of ICOSL yeast variants selected for binding to CTLA4, the F2 sort outputs gave MFI values of 949 when stained with 100 nM rCTLA4.Fc, whereas the parental ICOSL strain MFI was measured at 29 when stained with the same concentration of rCTLA4.Fc (32-fold improvement).

[0396] In the case of NKp30 yeast variants selected for binding to B7-H6, the F2 sort outputs gave MFI values of 533 when stained with 16.6 nM rB7H6.Fc, whereas the parental NKp30 strain MFI was measured at 90 when stained with the same concentration of rB7H6.Fc (6-fold improvement).

[0397] Importantly, the MFIs of all F2 outputs described above when measured with the anti-HA tag antibody on FL1 did not increase and sometimes decreased compared to wild-type strains, indicating that increased binding was not a function of increased expression of the selected variants on the surface of yeast, and validated gating strategies of only selecting mid to low expressors with high ligand binding.

### Example 4 Reformatting Selection Outputs as Fc-Fusions and in Various Immunomodulatory Protein Types

[0398] Example 4 describes reformatting of selection outputs as immunomodulatory proteins containing an affinity modified (variant) extracellular domain (ECD) of CD80 or ICOSL fused to an Fc molecule (variant ECD-Fc fusion molecules).

[0399] Output cells from final flow cytometric CD80 and ICOSL sorts were grown to terminal density in SCD-Leu medium. Plasmid DNA from each output were isolated using a yeast plasmid DNA isolation kit (Zymoresearch, USA). For Fc fusions, PCR primers with added restriction sites suitable for cloning into the Fc fusion vector of choice were used to batch-amplify from the plasmid DNA preps the coding DNA for the mutant target's ECD. After restriction digestion, the PCR products were ligated into an appropriate Fc fusion vector followed by chemical transformation into strain XL1 Blue E. Coli (Agilent, USA) or NEB5alpha (New England Biolabs) as directed by supplierExemplary of an Fc fusion vector is pFUSE-hIgG1-Fc2 (Invivogen, USA).

[0400] Dilutions of transformation reactions were plated on LB-agar containing 100 μg/ml carbenicillin (Teknova, USA) to generate single colonies. Up to 96 colonies from each transformation were then grown in 96 well plates to saturation overnight at 37° C. in LB-broth (Teknova cat # L8112) and a small aliquot from each well was submitted for DNA sequencing of the ECD insert in order to identify the mutation(s) in all clones. Sample preparation for DNA sequencing was carried out using protocols provided by the service provider (Genewiz; South Plainfield, N.J.). After removal of sample for DNA sequencing, glycerol was then added to the remaining cultures for a final glycerol content of 25% and plates were stored at −20° C. for future use as master plates (see below). Alternatively, samples for DNA sequencing were generated by replica plating from grown liquid cultures to solid agar plates using a disposable 96 well replicator (VWR, USA). These plates were incubated overnight to generate growth patches and the plates were submitted to Genewiz as specified by Genewiz.

[0401] After identification of clones of interest from analysis of Genewiz-generated DNA sequencing data, clones of interest were recovered from master plates and individually grown to density in 5 ml liquid LB-broth containing 100 μg/ml carbenicillin (Teknova, USA) and 2 ml of each culture were then used for preparation of approximately 10 μg of miniprep plasmid DNA of each clone using a standard kit such as the Pureyield kit (Promega). Identification of clones of interest generally involved the following steps. First, DNA sequence data files were downloaded from the Genewiz website. All sequences were then manually curated so that they start at the beginning of the ECD coding region. The curated sequences were then batch-translated using a suitable program available at the URL: www.ebi.ac.uk/Tools/st/emboss_transeq/. The translated sequences were then aligned using a suitable program available at the URL:multalin.toulouse.inra.fr/multalin/multalin.html.

[0402] Clones of interest were then identified using the following criteria: 1.) identical clone occurs at least two times in the alignment and 2.) a mutation occurs at least two times in the alignment and preferably in distinct clones. Clones that meet at least one of these criteria were clones that have been enriched by our sorting process due to improved binding.

[0403] The methods generated immunomodulatory proteins containing an ECD of CD80 or ICOSL with at least one affinity-modified domain in which the encoding DNA was generated to encode a protein designed as follows: signal peptide followed by variant (mutant) ECD followed by a linker of three alanines (AAA) followed by a human IgG1 Fc containing the mutation N297G (N82G with reference to wild-type human IgG1 Fc set forth in SEQ ID NO: 226). The human IgG1 Fc also contained the mutations R292C and V302C (corresponding to R77C and V87C with reference to wild-type human IgG1 Fc set forth in SEQ ID NO: 226). Since the construct does not include any antibody light chains that can form a covalent bond with a cysteine, the human IgG1 Fc also contained replacement of the cysteine residues to a serine residue at position 5 (C5S) compared to the wild-type or unmodified Fc set forth in SEQ ID NO: 226.

[0404] In addition, Example 8 below describes further immunomodulatory proteins that were generated as stack constructs containing at least two different affinity modified domains from identified variant CD80, CD86, ICOSL, and NKp30 molecules linked together and fused to an Fc.

### Example 5

### Expression and Purification of Fc-Fusions

[0405] Example 5 describes the high throughput expression and purification of Fc-fusion proteins containing variant ECD CD80, CD86, ICOSL, and Nkp30.

[0406] Recombinant variant Fc fusion proteins were produced with Expi293 expression system (Invitrogen, USA). 4 μg of each plasmid DNA from the previous step was added to 200 μl Opti-MEM (Invitrogen, USA) at the same time as 10.8 μl ExpiFectamine was separately added to another 200 μl Opti-MEM. After 5 minutes, the 200 μl of plasmid DNA was mixed with the 200 μl of ExpiFectamine and was further incubated for an additional 20 minutes before adding this mixture to cells. Ten million Expi293 cells were dispensed into separate wells of a sterile 10 ml, conical bottom, deep 24 well growth plate (Thomson Instrument Company, USA) in a volume 3.4 ml Expi293 media (Invitrogen, USA). Plates were shaken for 5 days at 120 RPM in a mammalian cell culture incubator set to 95% humidity and 8% CO₂. Following a 5 day incubation, cells were pelleted and culture supernatants were removed.

[0407] Protein was purified from supernatants using a high throughput 96 well Protein A purification kit using the manufacturer's protocol (Catalog number 45202, Life Technologies, USA). Resulting elution fractions were buffer exchanged into PBS using Zeba 96 well spin desalting plate (Catalog number 89807, Life Technologies, USA) using the manufacturer's protocol. Purified protein was quantitated using 280 nm absorbance measured by Nanodrop instrument (Thermo Fisher Scientific, USA), and protein purity was assessed by loading 5 μg of protein on NUPAGE pre-cast, polyacrylamide gels (Life Technologies, USA) under denaturing and reducing conditions and subsequent gel electrophoresis. Proteins were visualized in gel using standard Coomassie staining.

### Example 6

### Assessment of Binding and Activity of Affinity-Matured IgSF Domain-Containing Molecules

[0408] A. Binding to Cell Surface-Expressed Counter Structures

[0409] This Example describes Fc-fusion binding studies to show specificity and affinity of CD80 and ICOSL domain variant immunomodulatory proteins for cognate binding partners.

[0410] To produce cells expressing cognate binding partners, full-length mammalian surface expression constructs for each of human CD28, CTLA4, PD-L1, ICOS and B7-H6 were designed in pcDNA3.1 expression vector (Life Technologies) and sourced from Genscript, USA. Binding studies were carried out using the Expi293F transient transfection system (Life Technologies, USA) described above. The number of cells needed for the experiment was determined, and the appropriate 30 ml scale of transfection was performed using the manufacturer's suggested protocol. For each CD28, CTLA-4, PD-L1, ICOS, B7-H6, or mock 30 ml transfection, 75 million Expi293F cells were incubated with 30 μg expression construct DNA and 1.5 ml diluted ExpiFectamine 293 reagent for 48 hours, at which point cells were harvested for staining.

[0411] For staining by flow cytometry, 200,000 cells of appropriate transient transfection or negative control were plated in 96 well round bottom plates. Cells were spun down and resuspended in staining buffer (PBS (phosphate buffered saline), 1% BSA (bovine serum albumin), and 0.1% sodium azide) for 20 minutes to block non-specific binding. Afterwards, cells were centrifuged again and resuspended in staining buffer containing 100 nM to 1 nM variant immunomodulatory protein, depending on the experiment of each candidate CD80 variant Fc, ICOSL variant Fc, or stacked IgSF variant Fc fusion protein in 50 μl. Primary staining was performed on ice for 45 minutes, before washing cells in staining buffer twice. PE-conjugated anti-human Fc (Jackson ImmunoResearch, USA) was diluted 1:150 in 50 μl staining buffer and added to cells and incubated another 30 minutes on ice. Secondary antibody was washed out twice, cells were fixed in 4% formaldehyde/PBS, and samples were analyzed on FACScan flow cytometer (Becton Dickinson, USA).

[0412] Mean Fluorescence Intensity (MFI) was calculated for each transfectant and negative parental line with Cell Quest Pro software (Becton Dickinson, USA).

[0413] B. Bioactivity Characterization

[0414] This Example further describes Fc-fusion variant protein bioactivity characterization in human primary T cell in vitro assays.

[0415] 1. Mixed Lymphocyte Reaction (MLR)

[0416] Soluble rICOSL.Fc or rCD80.Fc bioactivity was tested in a human Mixed Lymphocyte Reaction (MLR). Human primary dendritic cells (DC) were generated by culturing monocytes isolated from PBMC (BenTech Bio, USA) in vitro for 7 days with 500 U/ml rIL-4 (R&D Systems, USA) and 250 U/ml rGM-CSF (R&D Systems, USA) in Ex-Vivo 15 media (Lonza, Switzerland). 10,000 matured DC and 100,000 purified allogeneic CD4+ T cells (BenTech Bio, USA) were co-cultured with ICOSL variant fusion protein, CD80 variant Fc fusion protein, or controls in 96 well round bottom plates in 200 μL final volume of Ex-Vivo 15 media. On day 5, IFN-gamma secretion in culture supernatants was analyzed using the Human IFN-gamma Duoset ELISA kit (R&D Systems, USA). Optical density was measured by VMax ELISA Microplate Reader (Molecular Devices, USA) and quantitated against titrated rIFN-gamma standard included in the IFN-gamma Duo-set kit (R&D Systems, USA).

[0417] 2. Anti-CD3 Coimmobilization Assay

[0418] Costimulatory bioactivity of ICOSL fusion variants and CD80 Fc fusion variants was determined in anti-CD3 coimmobilization assays. 1 nM or 4 nM mouse anti-human CD3 (OKT3, Biolegends, USA) was diluted in PBS with 1 nM to 80 nM rICOSL.Fc or rCD80.Fc variant proteins. This mixture was added to tissue culture treated flat bottom 96 well plates (Corning, USA) overnight to facilitate adherence of the stimulatory proteins to the wells of the plate. The next day, unbound protein was washed off the plates and 100,000 purified human pan T cells (BenTech Bio, US) or human T cell clone BC3 (Astarte Biologics, USA) were added to each well in a final volume of 200 μl of Ex-Vivo 15 media (Lonza, Switzerland). Cells were cultured 3 days before harvesting culture supernatants and measuring human IFN-gamma levels with Duoset ELISA kit (R&D Systems, USA) as mentioned above.

[0419] C. Results

[0420] Results for the binding and activity studies for exemplary tested variants are shown in Tables 8-10. In particular, Table 8 indicates exemplary IgSF domain amino acid substitutions (replacements) in the ECD of CD80 selected in the screen for affinity-maturation against the respective cognate structure CD28. Table 9 indicates exemplary IgSF domain amino acid substitutions (replacements) in the ECD of CD80 selected in the screen for affinity-maturation against the respective cognate structure PD-L1. Table 10 indicates exemplary IgSF domain amino acid substitutions (replacements) in the ECD of ICOSL selected in the screen for affinity-maturation against the respective cognate structures ICOS and CD28. For each Table, the exemplary amino acid substitutions are designated by amino acid position number corresponding to the respective reference unmodified ECD sequence as follows. For example, the reference unmodified ECD sequence in Tables 8 and 9 is the unmodified CD80 ECD sequence set forth in SEQ ID NO:28 and the reference unmodified ECD sequence in Table 10 is the unmodified ICOSL ECD sequence (SEQ ID NO:32). The amino acid position is indicated in the middle, with the corresponding unmodified (e.g. wild-type) amino acid listed before the number and the identified variant amino acid substitution listed after the number. Column 2 sets forth the SEQ ID NO identifier for the variant ECD for each variant ECD-Fc fusion molecule.

[0421] Also shown is the binding activity as measured by the Mean Fluorescence Intensity (MFI) value for binding of each variant Fc-fusion molecule to cells engineered to express the cognate counter structure ligand and the ratio of the MFI compared to the binding of the corresponding unmodified ECD-Fc fusion molecule not containing the amino acid substitution(s) to the same cell-expressed counter structure ligand. The functional activity of the variant Fc-fusion molecules to modulate the activity of T cells also is shown based on the calculated levels of IFN-gamma in culture supernatants (pg/ml) generated either i) with the indicated variant ECD-Fc fusion molecule coimmoblized with anti-CD3 or ii) with the indicated variant ECD-Fc fusion molecule in an MLR assay. The Tables also depict the ratio of IFN-gamma produced by each variant ECD-Fc compared to the corresponding unmodified ECD-Fc in both functional assays.

[0422] As shown, the selections resulted in the identification of a number of CD80 or ICOSL IgSF domain variants that were affinity-modified to exhibit increased binding for at least one, and in some cases more than one, cognate counter structure ligand. In addition, the results showed that affinity modification of the variant molecules also exhibited improved activities to both increase and decrease immunological activity depending on the format of the molecule. For example, coimmobilization of the ligand likely provides a multivalent interaction with the cell to cluster or increase the avidity to favor agonist activity and increase T cell activation compared to the unmodified (e.g. wildtype) ECD-Fc molecule not containing the amino acid replacement(s). However, when the molecule is provided as a bivalent Fc molecule in solution, the same IgSF domain variants exhibited an antagonist activity to decrease T cell activation compared to the unmodified (e.g. wildtype) ECD-Fv molecule not containing the amino acid replacement(s).

TABLE 8
CD80 variants selected against CD28. Molecule sequences, binding data, and
costimulatory bioactivity data.

| | | | | | Coimmobilization | |
|---|---|---|---|---|---|---|
| | | | | | with | |
| | | Binding | | | anti-CD3 | MLR |
| | | CD28 | CTLA-4 | PD-L1 | IFN-gamma | IFN-gamma |
| | SEQ ID | MFI | MFI | MFI | pg/ml | levels pg/ml |
| | NO | (parental | (parental | (parental | (parental | (parental |
| CD80 mutation(s) | (ECD) | ratio) | ratio) | ratio) | ratio) | ratio) |
| L70Q/A91G | 55 | 125 | 283 | 6 | 93 | 716 |
| | | (1.31) | (1.36) | (0.08) | (1.12) | (0.83) |
| L70Q/A91G/T130A | 56 | 96 | 234 | 7 | 99 | 752 |
| | | (1.01) | (1.13) | (0.10) | (1.19) | (0.87) |
| L70Q/A91G/I118A/ | 57 | 123 | 226 | 7 | 86 | 741 |
| T120S/T130A | | (1.29) | (1.09) | (0.10) | (1.03) | (0.86) |
| V4M/L70Q/A91G/ | 58 | 89 | 263 | 6 | 139 | 991 |
| T120S/T130A | | (0.94) | (1.26) | (0.09) | (1.67) | (1.14) |
| L70Q/A91G/T120S/ | 59 | 106 | 263 | 6 | 104 | 741 |
| T130A | | (1.12) | (1.26) | (0.09) | (1.25) | (0.86) |
| V20L/L70Q/A91S/ | 60 | 105 | 200 | 9 | 195 | 710 |
| T120S/T130A | | (1.11) | (0.96) | (0.13) | (2.34) | (0.82) |
| S44P/L70Q/A91G/ | 61 | 88 | 134 | 5 | 142 | 854 |
| T130A | | (0.92) | (0.64) | (0.07) | (1.71) | (0.99) |
| L70Q/A91G/E117G/ | 62 | 120 | 193 | 6 | 98 | 736 |
| T120S/T130A | | (1.27) | (0.93) | (0.08) | (1.05) | (0.85) |
| A91G/T120S/ | 63 | 84 | 231 | 44 | 276 | 714 |
| T130A | | (0.89) | (1.11) | (0.62) | (3.33) | (0.82) |
| L70R/A91G/T120S/ | 64 | 125 | 227 | 6 | 105 | 702 |
| T130A | | (1.32) | (1.09) | (0.09) | (1.26) | (0.81) |
| L70Q/E81A/A91G/ | 65 | 140 | 185 | 18 | 98 | 772 |
| T120S/I127T/ | | (1.48) | (0.89) | (0.25) | (1.18) | (0.89) |
| T130A | | | | | | |
| L70Q/Y87N/A91G/ | 66 | 108 | 181 | 6 | 136 | 769 |
| T130A | | (1.13) | (0.87) | (0.08) | (1.63) | (0.89) |
| T28S/L70Q/A91G/ | 67 | 32 | 65 | 6 | 120 | 834 |
| E95K/T120S/T130A | | (0.34) | (0.31) | (0.08) | (1.44) | (0.96) |
| N63S/L70Q/A91G/ | 68 | 124 | 165 | 6 | 116 | 705 |
| T120S/T130A | | (1.30) | (0.79) | (0.08) | (1.39) | (0.81) |
| K36E/I67T/L70Q/ | 69 | 8 | 21 | 5 | 53 | 852 |
| A91G/T120S/ | | (0.09) | (0.10) | (0.08) | (0.63) | (0.98) |
| T130A/N152T | | | | | | |
| E52G/L70Q/A91G/ | 70 | 113 | 245 | 6 | 94 | 874 |
| T120S/T130A | | (1.19) | (1.18) | (0.08) | (1.13) | (1.01) |
| K37E/F59S/L70Q/ | 71 | 20 | 74 | 6 | 109 | 863 |
| A91G/T120S/ | | (0.21) | (0.36) | (0.08) | (1.31) | (1.00) |
| T130A | | | | | | |
| A91G/S103P | 72 | 39 | 56 | 9 | 124 | 670 |
| | | (0.41) | (0.27) | (0.13) | (1.49) | (0.77) |
| K89E/T130A | 73 | 90 | 148 | 75 | 204 | 761 |
| | | (0.95) | (0.71) | (1.07) | (2.45) | (0.88) |
| A91G | 74 | 96 | 200 | 85 | 220 | 877 |
| | | (1.01) | (0.96) | (1.21) | (2.65) | (1.01) |
| D60V/A91G/T120S/ | 75 | 111 | 222 | 12 | 120 | 744 |
| T130A | | (1.17) | (1.07) | (0.18) | (1.44) | (0.86) |
| K54M/A91G/T120S | 76 | 68 | 131 | 5 | 152 | 685 |
| | | (0.71) | (0.63) | (0.08) | (1.83) | (0.79) |
| M38T/L70Q/E77G/ | 77 | 61 | 102 | 5 | 119 | 796 |
| A91G/T120S/ | | (0.64) | (0.49) | (0.07) | (1.43) | (0.92) |
| T130A/N152T | | | | | | |
| R29H/E52G/L70R/ | 78 | 100 | 119 | 5 | 200 | 740 |
| E88G/A91G/T130A | | (1.05) | (0.57) | (0.08) | (2.41) | (0.85) |
| Y31H/T41G/L70Q/ | 79 | 85 | 85 | 6 | 288 | 782 |
| A91G/T120S/ | | (0.89) | (0.41) | (0.08) | (3.47) | (0.90) |
| T130A | | | | | | |
| V68A/110A | 80 | 103 | 233 | 48 | 163 | 861 |
| | | (1.08) | (1.12) | (0.68) | (1.96) | (0.99) |
| S66H/D90G/T110A/ | 81 | 33 | 121 | 11 | 129 | 758 |
| F116L | | (0.35) | (0.58) | (0.15) | (1.55) | (0.88) |
| R29H/E52G/T120S/ | 82 | 66 | 141 | 11 | 124 | 800 |
| T130A | | (0.69) | (0.68) | (0.15) | (1.49) | (0.92) |
| A91G/L102S | 83 | 6 | 6 | 5 | 75 | 698 |
| | | (0.06) | (0.03) | (0.08) | (0.90) | (0.81) |
| I67T/L70Q/A91G/ | 84 | 98 | 160 | 5 | 1751 | 794 |
| T120S | | (1.03) | (0.77) | (0.08) | (21.1) | (0.92) |
| L70Q/A91G/T110A/ | 85 | 8 | 14 | 5 | 77 | 656 |
| T120S/T130A | | (0.09) | (0.07) | (0.07) | (0.93) | (0.76) |
| M38V/T41D/M43I/ | 86 | 5 | 8 | 8 | 82 | 671 |
| W50G/D76G/V83A/ | | (0.06) | (0.04) | (0.11) | (0.99) | (0.78) |
| K89E/T120S/T130A | | | | | | |
| V22A/L70Q/S121P | 87 | 5 | 7 | 5 | 105 | 976 |
| | | (0.06) | (0.04) | (0.07) | (1.27) | (1.13) |
| A12V/S15F/Y31H/ | 88 | 6 | 6 | 5 | 104 | 711 |
| T41G/T130A/P137L/ | | (0.06) | (0.03) | (0.08) | (1.25) | (0.82) |
| N152T | | | | | | |
| I67F/L70R/E88G/ | 89 | 5 | 6 | 6 | 62 | 1003 |
| A91G/T120S/T130A | | (0.05) | (0.03) | (0.08) | (0.74) | (1.16) |
| E24G/L25P/L70Q/ | 90 | 26 | 38 | 8 | 101 | 969 |
| T120S | | (0.27) | (0.18) | (0.11) | (1.21) | (1.12) |
| A91G/F92L/F108L/ | 91 | 50 | 128 | 16 | 59 | 665 |
| T120S | | (0.53) | (0.61) | (0.11) | (0.71) | (0.77) |
| WT CD80 | 28 | 95 | 208 | 70 | 83 | 866 |
| | | (1.00) | (1.00) | (1.00) | (1.00) | (1.00) |

TABLE 9
CD80 variants selected against PD-L1. Molecule sequences, binding data, and
costimulatory bioactivity data.

| | | | | | Coimmobilization | MLR |
|---|---|---|---|---|---|---|
| | | | | | with | IFN- |
| | | Binding | | | anti-CD3 | gamma |
| | | CD28 | CTLA-4 | PD-L1 | IFN-gamma | levels |
| | SEQ ID | MFI | MFI | MFI | pg/ml | pg/ml |
| | NO | (parental | (parental | (parental | (parental | (parental |
| CD80 mutation(s) | (ECD) | ratio) | ratio) | ratio) | ratio) | ratio) |
| R29D/Y31L/Q33H/ | 92 | 1071 | 1089 | 37245 | 387 | 5028 |
| K36G/M38I/T41A/ | | (0.08) | (0.02) | (2.09) | (0.76) | (0.26) |
| M43R/M47T/E81V/ | | | | | | |
| L85R/K89N/A91T/ | | | | | | |
| F92P/K93V/R94L/ | | | | | | |
| I118T/N149S | | | | | | |
| R29D/Y31L/Q33H/ | 93 | 1065 | 956 | 30713 | 400 | 7943 |
| K36G/M38I/T41A/ | | (0.08) | (0.02) | (1.72) | (0.79) | (0.41) |
| M43R/M47T/E81V/ | | | | | | |
| L85R/K89N/A91T/ | | | | | | |
| F92P/K93V/R94L/ | | | | | | |
| N144S/N149S | | | | | | |
| R29D/Y31L/Q33H/ | 94 | 926 | 954 | 47072 | 464 | 17387 |
| K36G/M38I/T41A/ | | (0.07) | (0.02) | (2.64) | (0.91) | (0.91) |
| M42T/M43R/M47T/ | | | | | | |
| E81V/L85R/K89N/ | | | | | | |
| A91T/F92P/K93V/ | | | | | | |
| R94L/L148S/N149S | | | | | | |
| E24G/R29D/Y31L/ | 95 | 1074 | 1022 | 1121 | 406 | 13146 |
| Q33H/K36G/M38I/ | | (0.08) | (0.02) | (0.06) | (0.80) | (0.69) |
| T41A/M43R/M47T/ | | | | | | |
| F59L/E81V/L85R/ | | | | | | |
| K89N/A91T/F92P/ | | | | | | |
| K93V/R94L/H96R | | | | | | |
| R29D/Y31L/Q33H/ | 96 | 1018 | 974 | 25434 | 405 | 24029 |
| K36G/M38I/T41A/ | | (0.08) | (0.02) | (1.43) | (0.80) | (1.25) |
| M43R/M47T/E81V/ | | | | | | |
| L85R/K89N/A91T/ | | | | | | |
| F92P/K93V/R94L/ | | | | | | |
| N149S | | | | | | |
| R29V/M43Q/E81R/ | 97 | 1029 | 996 | 1575 | 342 | 11695 |
| L85I/K89R/D90L/ | | (0.08) | (0.02) | (0.09) | (0.67) | (0.61) |
| A91E/F92N/K93Q/ | | | | | | |
| R94G | | | | | | |
| T41I/A91G | 98 | 17890 | 50624 | 12562 | 433 | 26052 |
| | | (1.35) | (1.01) | (0.70) | (0.85) | (1.36) |
| K89R/D90K/A91G/ | 99 | 41687 | 49429 | 20140 | 773 | 6345 |
| F92Y/K93R/N122S/ | | (3.15) | (0.99) | (1.13) | (1.52) | (0.33) |
| N178S | | | | | | |
| K89R/D90K/A91G/ | 100 | 51663 | 72214 | 26405 | 1125 | 9356 |
| F92Y/K93R | | (3.91) | (1.44) | (1.48) | (2.21) | (0.49) |
| K36G/K37Q/M38I/ | 101 | 1298 | 1271 | 3126 | 507 | 3095 |
| F59L/E81V/L85R/ | | (0.10) | (0.03) | (0.18) | (1.00) | (0.16) |
| K89N/A91T/F92P/ | | | | | | |
| K93V/R94L/E99G/ | | | | | | |
| T130A/N149S | | | | | | |
| AE88D/K89R/D90K/ | 102 | 31535 | 50868 | 29077 | 944 | 5922 |
| A91G/F92Y/K93R | | (2.38) | (1.02) | (1.63) | (1.85) | (0.31) |
| K36G/K37Q/M38I/ | 103 | 1170 | 1405 | 959 | 427 | 811 |
| L40M | | (0.09) | (0.03) | (0.05) | (0.84) | (0.04) |
| K36G | 104 | 29766 | 58889 | 20143 | 699 | 30558 |
| | | (2.25) | (1.18) | (1.13) | (1.37) | (1.59) |
| WTCD80 | 28 | 13224 | 50101 | 17846 | 509 | 19211 |
| | | (1.00) | (1.00) | (1.00) | (1.00) | (1.00) |

TABLE 10
ICOSL variants selected against CD28 or ICOS. Molecule sequences,
binding data, and costimulatory bioactivity data.

| | | | | | | Coimmobilization | | | |
|---|---|---|---|---|---|---|---|---|---|
| | | | | | | with anti-CD3 | | MLR | |
| | | Binding | | | | IFN-gamma | | IFN-gamma | |
| | SEQ | ICOS OD | | CD28 MFI | | pg/ml | | levels pg/ml | |
| ICOSL | ID NO | (parental | | (parental | | (parental | | (parental | |
| mutation(s) | (ECD) | ratio) | | ratio) | | ratio) | | ratio) | |
| N52S | 109 | 1.33 | (1.55) | 162 | (9.00) | 1334 | (1.93) | 300 | (0.44) |
| N52H | 110 | 1.30 | (1.51) | 368 | (20.44) | 1268 | (1.83) | 39 | (0.06) |
| N52D | 111 | 1.59 | (1.85) | 130 | (7.22) | 1943 | (2.80) | 190 | (0.28) |
| N52Y/N57Y/ | 112 | 1.02 | (1.19) | 398 | (22.11) | 510* | (1.47*) | 18 | (0.03) |
| F138L/L203P | | | | | | | | | |
| N52H/N57Y/Q100P | 113 | 1.57 | (1.83) | 447 | (24.83) | 2199 | (3.18) | 25 | (0.04) |
| N52S/Y146C/ | 114 | 1.26 | (1.47) | 39 | (2.17) | 1647 | (2.38) | 152 | (0.22) |
| Y152C | | | | | | | | | |
| N52H/C198R | 115 | 1.16 | (1.35) | 363 | (20.17) | 744* | (2.15*) | ND | (ND) |
| N52H/C140D/T225A | 116 | ND | (ND) | 154 | (8.56) | 522* | (1.51*) | ND | (ND) |
| N52H/C198R/T225A | 117 | 1.41 | (1.64) | 344 | (19.11) | 778* | (2.25*) | 0 | (0) |
| N52H/K92R | 118 | 1.48 | (1.72) | 347 | (19.28) | 288* | (0.83*) | 89 | (0.13) |
| N52H/S99G | 119 | 0.09 | (0.10) | 29 | (1.61) | 184* | (0.53*) | 421 | (0.61) |
| N52Y | 120 | 0.08 | (0.09) | 18 | (1.00) | 184* | (0.53*) | 568 | (0.83) |
| N57Y | 121 | 1.40 | (1.63) | 101 | (5.61) | 580* | (1.68*) | 176 | (0.26) |
| N57Y/Q100P | 122 | 0.62 | (0.72) | 285 | (15.83) | 301* | (0.87*) | 177 | (0.26) |
| N52S/S130G/ | 123 | 0.16 | (0.19) | 24 | (1.33) | 266* | (0.77*) | 1617 | (2.35) |
| Y152C | | | | | | | | | |
| N52S/Y152C | 124 | 0.18 | (0.21) | 29 | (1.61) | 238* | (0.69*) | 363 | (0.53) |
| N52S/C198R | 125 | 1.80 | (2.09) | 82 | (4.56) | 1427 | (2.06) | 201 | (0.29) |
| N52Y/N57Y/Y152C | 126 | 0.08 | (0.09) | 56 | (3.11) | 377* | (1.09*) | 439 | (0.64) |
| N52Y/N57Y/ | 127 | ND | (ND) | 449 | (24.94) | 1192 | (1.72) | ND | (ND) |
| H129P/C198R | | | | | | | | | |
| N52H/L161P/ | 128 | 0.18 | (0.21) | 343 | (19.05) | 643* | (1.86*) | 447 | (0.65) |
| C198R | | | | | | | | | |
| N52S/T113E | 129 | 1.51 | (1.76) | 54 | (3.00) | 451* | (1.30*) | 345 | (0.50) |
| S54A | 130 | 1.62 | (1.88) | 48 | (2.67) | 386* | (1.12*) | 771 | (1.12) |
| N52D/S54P | 131 | 1.50 | (1.74) | 38 | (2.11) | 476* | (1.38*) | 227 | (0.33) |
| N52K/L208P | 132 | 1.91 | (2.22) | 291 | (16.17) | 1509 | (2.18) | 137 | (0.20) |
| N52S/Y152H | 133 | 0.85 | (0.99) | 68 | (3.78) | 2158 | (3.12) | 221 | (0.32) |
| N52D/V151A | 134 | 0.90 | (1.05) | 19 | (1.06) | 341* | (0.99*) | 450 | (0.66) |
| N52H/I143T | 135 | 1.83 | (2.13) | 350 | (19.44) | 2216 | (3.20) | 112 | (0.16) |
| N52S/L80P | 136 | 0.09 | (0.10) | 22 | (1.22) | 192* | (0.55*) | 340 | (0.49) |
| F120S/Y152H/N201S | 137 | 0.63 | (0.73) | 16 | (0.89) | 351* | (1.01*) | 712 | (1.04) |
| N52S/R75Q/L203P | 138 | 1.71 | (1.99) | 12 | (0.67) | 1996 | (2.88) | 136 | (0.20) |
| N52S/D158G | 139 | 1.33 | (1.55) | 39 | (2.17) | 325* | (0.94*) | 277 | (0.40) |
| N52D/Q133H | 140 | 1.53 | (1.78) | 104 | (5.78) | 365* | (1.05*) | 178 | (0.26) |
| WT ICOSL | 32 | 0.86 | (1.00) | 18 | (1.00) | 692/346* | (1.00) | 687 | (1.00) |

*Parental ratio calculated using 346 pg/ml IFN-gamma for WT ICOSL

### Example 7

### Ligand Binding Competition Assay

[0423] As shown in Example 6, several CD80 variant molecules exhibited improved binding to one or both of CD28 and PD-L1. To further assess the binding activity of CD80 to ligands CD28 and PD-L1, this Example describes a ligand competition assay assessing the non-competitive nature of exemplary CD80 variants to bind both CD28 and PD-L1.

[0424] An ELISA based binding assay was set up incorporating plate-bound CD80 variant A91G ECD-Fc to assess the ability of CD80 to simultaneously bind CD28 and PD-L1. Maxisorp 96 well ELISA plates (Nunc, USA) were coated overnight with 100 nM human recombinant CD80 variant A91G ECD-Fc fusion protein in PBS. The following day unbound protein was washed out, and the plate was blocked with 1% bovine serum albumin (Millipore, USA)/PBS for 1 hour at room temperature. This blocking reagent was washed out three times with PBS/0.05% Tween, which included a two minute incubation on a platform shaker for each wash.

[0425] In one arm of the competition assay, CD80 was incubated with CD28, and then CD28-bound CD80 was then assessed for competitive binding in the presence of either the other known CD80 ligand counter structures PD-L1 or CTLA-4 or negative control ligand PD-L2. Specifically, biotinylated recombinant human CD28 Fc fusion protein (rCD28.Fc; R&D Systems) was titrated into the wells starting at 10 nM, diluting out for eight points with 1:2 dilutions in 25 μl volume. Immediately after adding the biotinylated rCD28.Fc, unlabeled competitive binders, recombinant human PD-L1 monomeric his-tagged protein, recombinant human CTLA-4 monomeric his-tagged protein, or a negative control human recombinant PD-L2 Fc fusion protein (R&D Systems) were added to wells at 2000/1000/500 nM respectively in 25 μl volume for a final volume of 50 μl. These proteins were incubated together for one hour before repeating the three wash steps as described above.

[0426] After washing, 2.5 ng per well of HRP-conjugated streptavidin (Jackson Immunoresearch, USA) was diluted in 1% BSA/PBS and added to wells to detect bound biotinylated rCD28.Fc. After one hour incubation, wells were washed again three times as described above. To detect signal, 50 μl of TMB substrate (Pierce, USA) was added to wells following wash and incubated for 7 minutes, before adding 50 ul 2M sulfuric acid stop solution. Optical density was determined on an Emax Plus microplate reader (Molecular Devices, USA). Optical density values were graphed in Prism (Graphpad, USA).

[0427] The results are set forth in FIG. 1A. The results showed decreased binding of biotinylated rCD28.Fc to the CD80 variant A91G ECD-Fc fusion protein with titration of the rCD28.Fc. When rCD28.Fc binding was performed in the presence of non-competitive control protein, rPDL2, there was no decrease in CD28 binding for CD80 (solid triangle). In contrast, a competitive control protein, rCTLA-4, when incubated with the CD28.Fc, did result in decreased CD28 binding for CD80 as expected (x line). When recombinant PD-L1 was incubated with CD28.Fc, no decrease in CD28 binding to CD80 was observed, which demonstrated that the epitopes of CD28 and PD-L1 for CD80 are non-competitive. Binding of the recombinant PD-L1 protein used in the CD28 competition assay to CD80 was confirmed by incubating the biotinylated PD-L1 in the presence of non-biotinylated rCD28.Fc (square).

[0428] The reverse competition also was set up in which CD80 was incubated with PD-L1, and then PD-L1-bound CD80 was then assessed for competitive binding in the presence of either the other known CD80 ligand counter structures CD28 or CTLA-4 or negative control ligand PD-L2. Specifically, the assay was performed by titrating biotinylated recombinant human PD-L1-his monomeric protein into wells containing the recombinant CD80 variant. Because binding is weaker with this ligand, titrations started at 5000 nM with similar 1:2 dilutions over eight points in 25 μL. When the rPD-L1-his was used to detect binding, the competitive ligands human rCD28.Fc, human rCTLA-4.Fc, or human rPD-L2.Fc control were added at 2.5 nM final concentration in 25 μl for a total volume of 50 μl. The subsequent washes, detection, and OD measurements were the same as described above.

[0429] The results are set forth in FIG. 1B. Titrated PD-L1-his binding alone confirmed that PD-L1 bound to the CD80 variant A91G ECD-Fc fusion molecule immobilized on the plate (square). When PD-L1-his binding was performed in the presence of non-competitive control protein, rPDL2, there was no decrease in PD-L1 binding for CD80 (triangle). The CD28-competitive control protein, rCTLA-4, when incubated with the PD-L1-his, did not result in decreased PD-L1 binding for CD80 (x line), even though CTLA-4 is competitive for CD28. This result further demonstrated that lack of competition between CD28 and PD-L1 for CD80 binding. Finally, when PD-L1-his was incubated with CD28.Fc, no decrease in PD-L1 binding to CD80 was observed, which demonstrated that the epitopes of CD28 and PD-L1 for CD80 are non-competitive.

[0430] Thus, the results showed that CTLA-4, but not PD-L1 or the negative control PD-L2, competed for binding of CD28 to CD80 (FIG. 1A) and that CD28, CTLA-4, and PD-L2 did not compete for binding of PD-L1 to CD80 (FIG. 1B). Thus, these results demonstrated that CD28 and PD-L1 are non-competitive binders of CD80, and that this non-competitive binding can be demonstrated independently of which ligand is being detected in the ELISA.

### Example 8

### Generation and Assessment of Stacked Molecules Containing Different Affinity-Modified Domains

[0431] Selected variant molecules described above that were affinity-modified for one or more counter structure ligand were used to generate “stack” molecule (i.e., Type II immunomodulatory protein) containing two or more affinity-modified IgSF domains. Stack constructs were obtained as geneblocks (Integrated DNA Technologies, Coralville, Iowa) that encode the stack in a format that enables its fusion to Fc by standard Gibson assembly using a Gibson assembly kit (New England Biolabs).

[0432] The encoding nucleic acid molecule of all stacks was generated to encode a protein designed as follows: Signal peptide, followed by the first variant IgV of interest, followed by a 15 amino acid linker which is composed of three GGGGS(G4S) motifs (SEQ ID NO:228), followed by the second IgV of interest, followed by two GGGGS linkers (SEQ ID NO: 229) followed by three alanines (AAA), followed by a human IgG1 Fc as described above. To maximize the chance for correct folding of the IgV domains in each stack, the first IgV was preceded by all residues that normally occur in the wild-type protein between this IgV and the signal peptide (leading sequence). Similarly, the first IgV was followed by all residues that normally connect it in the wild-type protein to either the next Ig domain (typically an IgC domain) or if such a second IgV domain is absent, the residues that connect it to the transmembrane domain (trailing sequence). The same design principle was applied to the second IgV domain except that when both IgV domains were derived from same parental protein (e.g. a CD80 IgV stacked with another CD80 IgV), the linker between both was not duplicated.

[0433] Table 11 sets forth the design for exemplary stacked constructs. The exemplary stack molecules shown in Table 11 contain the IgV domains as indicated and additionally leading or trailing sequences as described above. In the Table, the following components are present in order: signal peptide (SP; SEQ ID NO:225), IgV domain 1 (IgV1), trailing sequence 1 (TS1), linker 1 (LR1; SEQ ID NO:228), IgV domain 2(IgV2), trailing sequence 2 (TS2), linker 2 (LR2; SEQ ID NO:230) and Fc domain (SEQ ID NO:226 containing C5S/N82G amino acid substitution). In some cases, a leading sequence 1(LS1) is present between the signal peptide and IgV1 and in some cases a leading sequence 2 (LS2) is present between the linker and IgV2.

TABLE 11
Amino acid sequence (SEQ ID NO) of components of exemplary stacked constructs

| | | First domain | | | | Second domain | | | | |
|---|---|---|---|---|---|---|---|---|---|---|
| | SP | LS1 | IgV1 | TS1 | LR1 | LS2 | IgV2 | TS2 | LR2 | Fc |
| NKp30 WT | + | — | SEQ ID | SEQ ID | + | — | SEQ ID | SEQ ID | + | + |
| ICOSL WT | | | NO: 214 | NO: 235 | | | NO: 196 | NO: 233 | | |
| NKp30 | + | — | SEQ ID | SEQ ID | + | — | SEQ ID | SEQ ID | + | + |
| L30V/A60V/S64P/ | | | NO: 215 | NO: 235 | | | NO: 212 | NO: 233 | | |
| S86G | | | | | | | | | | |
| ICOSL | | | | | | | | | | |
| N52S/N57Y/H94D/ | | | | | | | | | | |
| L96F/L98F/Q100R | | | | | | | | | | |
| NKp30 | + | — | SEQ ID | SEQ ID | + | — | SEQ ID | SEQ ID | + | + |
| L30V/A60V/S64P/ | | | NO: 215 | NO: 235 | | | NO: 199 | NO: 233 | | |
| S86G) | | | | | | | | | | |
| ICOSL N52D | | | | | | | | | | |
| NKp30 | + | — | SEQ ID | SEQ ID | + | — | SEQ ID | SEQ ID | + | + |
| L30V/A60V/S64P/ | | | NO: 215 | NO: 235 | | | NO: 201 | NO: 233 | | |
| S86G | | | | | | | | | | |
| ICOSL | | | | | | | | | | |
| N52H/N57Y/Q100P | | | | | | | | | | |
| ICOSL WT | + | — | SEQ ID | SEQ ID | + | — | SEQ ID | SEQ ID | + | + |
| Nkp30 WT | | | NO: 196 | NO: 233 | | | NO: 214 | NO: 235 | | |
| ICOSL N52D | + | — | SEQ ID | SEQ ID | + | — | SEQ ID | SEQ ID | + | + |
| NKp30 | | | NO: 199 | NO: 233 | | | NO: 215 | NO: 235 | | |
| L30V/A60V/S64P/ | | | | | | | | | | |
| S86G | | | | | | | | | | |
| ICOSL | + | — | SEQ ID | SEQ ID | + | — | SEQ ID | SEQ ID | + | + |
| N52H/N57Y/Q100P | | | NO: 201 | NO: 233 | | | NO: 215 | NO: 235 | | |
| NKp30 | | | | | | | | | | |
| L30V/A60V/S64P/ | | | | | | | | | | |
| S86G | | | | | | | | | | |
| Domain 1: NKp30 | + | — | SEQ ID | SEQ ID | + | — | SEQ ID | SEQ ID | + | + |
| WT | | | NO: 214 | NO: 235 | | | NO: 152 | NO: 231 | | |
| Domain 2: CD80 | | | | | | | | | | |
| WT | | | | | | | | | | |
| Domain 1: NKp30 | + | — | SEQ ID | SEQ ID | + | SEQ | SEQ ID | SEQ ID | + | + |
| WT | | | NO: 214 | NO: 235 | | ID | NO: 220 | NO: 237 | | |
| Domain 2: CD86 | | | | | | NO: | | | | |
| WT | | | | | | 236 | | | | |
| Domain 1: NKp30 | + | — | SEQ ID | SEQ ID | + | — | SEQ ID | SEQ ID | + | + |
| L30V/A60V/S64P/ | | | NO: 215 | NO: 235 | | | NO: 192 | NO: 231 | | |
| S86G | | | | | | | | | | |
| Domain 2: CD80 | | | | | | | | | | |
| R29H/Y31H/T41G/ | | | | | | | | | | |
| Y87N/E88G/K89E/ | | | | | | | | | | |
| D90N/A91G/P109S | | | | | | | | | | |
| Domain 1: NKp30 | + | — | SEQ ID | SEQ ID | + | — | SEQ ID | SEQ ID | + | + |
| L30V/A60V/S64P/ | | | NO: 215 | NO: 235 | | | NO: 175 | NO: 231 | | |
| S86G | | | | | | | | | | |
| Domain 2: CD80 | | | | | | | | | | |
| I67T/L70Q/A91G/ | | | | | | | | | | |
| T120S | | | | | | | | | | |
| Domain 1: NKp30 | + | — | SEQ ID | SEQ ID | + | SEQ | SEQ ID | SEQ ID | + | + |
| L30V/A60V/S64P/ | | | NO: 215 | NO: 235 | | ID | NO: 221 | NO: 237 | | |
| S86G | | | | | | NO: | | | | |
| Domain 2: CD86 | | | | | | 236 | | | | |
| Q35H/H90L/Q102H | | | | | | | | | | |
| Domain 1: CD80 | + | — | SEQ ID | SEQ ID | + | — | SEQ ID | SEQ ID | + | + |
| WT | | | NO: 152 | NO: 231 | | | NO: 214 | NO: 235 | | |
| Domain 2: Nkp30 | | | | | | | | | | |
| WT | | | | | | | | | | |
| Domain 1: CD86 | + | SEQ | SEQ ID | SEQ ID | + | — | SEQ ID | SEQ ID | + | + |
| WT | | ID | NO: 220 | NO: 237 | | | NO: 214 | NO: 235 | | |
| Domain 2: Nkp30 | | NO: | | | | | | | | |
| WT | | 236 | | | | | | | | |
| Domain 1: CD80 | + | — | SEQ ID | SEQ ID | + | — | SEQ ID | SEQ ID | + | + |
| R29H/Y31H/T41G/ | | | NO: 192 | NO: 231 | | | NO: 215 | NO: 235 | | |
| Y87N/E88G/K89E/ | | | | | | | | | | |
| D90N/A91G/P109S | | | | | | | | | | |
| Domain 2: NKp30 | | | | | | | | | | |
| L30V/A60V/S64P/ | | | | | | | | | | |
| S86G | | | | | | | | | | |
| Domain 1: CD80 | + | — | SEQ ID | SEQ ID | + | — | SEQ ID | SEQ ID | + | + |
| I67T/L70Q/A91G/ | | | NO: 175 | NO: 231 | | | NO: 215 | NO: 235 | | |
| T120S | | | | | | | | | | |
| Domain 2: NKp30 | | | | | | | | | | |
| L30V/A60V/S64P/ | | | | | | | | | | |
| S86G | | | | | | | | | | |
| Domain 1: CD86 | + | SEQ | SEQ ID | SEQ ID | + | — | SEQ ID | SEQ ID | + | + |
| Q35H/H90L/Q102H | | ID | NO: 221 | NO: 237 | | | NO: 215 | NO: 235 | | |
| Domain 2: NKp30 | | NO: | | | | | | | | |
| L30V/A60V/S64P/ | | 236 | | | | | | | | |
| S86G | | | | | | | | | | |
| Domain 1: CD80 | + | — | SEQ ID | SEQ ID | + | — | SEQ ID | SEQ ID | + | + |
| WT | | | NO: 152 | NO: 231 | | | NO: 196 | NO: 233 | | |
| Domain 2: ICOSL | | | | | | | | | | |
| WT | | | | | | | | | | |
| Domain 1: CD80 | + | — | SEQ ID | SEQ ID | + | SEQ | SEQ ID | SEQ ID | + | + |
| WT | | | NO: 152 | NO: 231 | | ID | NO: 220 | NO: 237 | | |
| Domain 2: CD86 | | | | | | NO: | | | | |
| WT | | | | | | 236 | | | | |
| Domain 1: CD80 | + | — | SEQ ID | SEQ ID | + | — | SEQ ID | SEQ ID | + | + |
| WT | | | NO: 152 | NO: 231 | | | NO: 152 | NO: 231 | | |
| Domain 2: CD80 | | | | | | | | | | |
| WT | | | | | | | | | | |
| Domain 1: CD80 | + | — | SEQ ID | SEQ ID | + | — | SEQ ID | SEQ ID | + | + |
| E88D/K89R/D90K/ | | | NO: 189 | NO: 231 | | | NO: 192 | NO: 231 | | |
| A91G/F92Y/K93R | | | | | | | | | | |
| Domain 2: CD80 | | | | | | | | | | |
| R29H/Y31H/T41G/ | | | | | | | | | | |
| Y87N/E88G/K89E/ | | | | | | | | | | |
| D90N/A91G/P109S | | | | | | | | | | |
| Domain 1: CD80 | + | — | SEQ ID | SEQ ID | + | — | SEQ ID | SEQ ID | + | + |
| A12T/H18L/N43V/ | | | NO: 193 | NO: 231 | | | NO: 192 | NO: 231 | | |
| F59L/E77K/P109S/ | | | | | | | | | | |
| I118T | | | | | | | | | | |
| Domain 2: CD80 | | | | | | | | | | |
| R29H/Y31H/T41G/ | | | | | | | | | | |
| Y87N/E88G/K89E/ | | | | | | | | | | |
| D90N/A91G/P109S | | | | | | | | | | |
| Domain 1: CD80 | + | — | SEQ ID | SEQ ID | + | — | SEQ ID | SEQ ID | + | + |
| A12T/H18L/N43V/ | | | NO: 193 | NO: 231 | | | NO: 175 | NO: 231 | | |
| F59L/E77K/P109S/ | | | | | | | | | | |
| I118T | | | | | | | | | | |
| Domain 2: CD80 | | | | | | | | | | |
| I67T/L70Q/A91G/ | | | | | | | | | | |
| T120S | | | | | | | | | | |
| Domain 1: CD80 | + | — | SEQ ID | SEQ ID | + | SEQ | SEQ ID | SEQ ID | + | + |
| E88D/K89R/D90K/ | | | NO: 189 | NO: 231 | | ID | NO: 221 | NO: 237 | | |
| A91G/F92Y/K93R | | | | | | NO: | | | | |
| Domain 2: CD86 | | | | | | 236 | | | | |
| Q35H/H90L/Q102H | | | | | | | | | | |
| Domain 1: CD80 | + | — | SEQ ID | SEQ ID | + | SEQ | SEQ ID | SEQ ID | + | + |
| A12T/H18L/N43V/ | | | NO: 193 | NO: 231 | | ID | NO: 221 | NO: 237 | | |
| F59L/E77K/P109S/ | | | | | | NO: | | | | |
| I118T | | | | | | 236 | | | | |
| Domain 1: CD86 | | | | | | | | | | |
| Q35H/H90L/Q102H | | | | | | | | | | |
| Domain 1: CD80 | + | — | SEQ ID | SEQ ID | + | — | SEQ ID | SEQ ID | + | + |
| E88D/K89R/D90K/ | | | NO: 189 | NO: 231 | | | NO: 213 | NO: 233 | | |
| A91G/F92Y/K93R | | | | | | | | | | |
| Domain 2: ICOSL | | | | | | | | | | |
| N52S/N57Y/H94D/ | | | | | | | | | | |
| L96F/L98F/Q100R/ | | | | | | | | | | |
| G103E/ | | | | | | | | | | |
| F120S | | | | | | | | | | |
| Domain 1: CD80 | + | — | SEQ ID | SEQ ID | + | — | SEQ ID | SEQ ID | + | + |
| A12T/H18L/N43V/ | | | NO: 193 | NO: 231 | | | NO: 213 | NO: 233 | | |
| F59L/E77K/P109S/ | | | | | | | | | | |
| I118T | | | | | | | | | | |
| Domain 2: ICOSL | | | | | | | | | | |
| N52S/N57Y/H94D/ | | | | | | | | | | |
| L96F/L98F/Q100R/ | | | | | | | | | | |
| G103E/ | | | | | | | | | | |
| F120S | | | | | | | | | | |
| Domain 1: CD80 | + | — | SEQ ID | SEQ ID | + | — | SEQ ID | SEQ ID | + | + |
| A12T/H18L/N43V/ | | | NO: 193 | NO: 231 | | | NO: 199 | NO: 233 | | |
| F59L/E77K/P109S/ | | | | | | | | | | |
| I118T | | | | | | | | | | |
| Domain 2: ICOSL | | | | | | | | | | |
| N52D | | | | | | | | | | |
| Domain 1: CD80 | + | — | SEQ ID | SEQ ID | + | — | SEQ ID | SEQ ID | + | + |
| E88D/K89R/D90K/ | | | NO: 189 | NO: 231 | | | NO: 201 | NO: 233 | | |
| A91G/F92Y/K93R | | | | | | | | | | |
| Domain 2: ICOSL | | | | | | | | | | |
| N52H/N57Y/Q100P | | | | | | | | | | |
| Domain 1: CD80 | + | — | SEQ ID | SEQ ID | + | — | SEQ ID | SEQ ID | + | + |
| A12T/H18L/N43V/ | | | NO: 193 | NO: 231 | | | NO: 201 | NO: 233 | | |
| F59L/E77K/P109S/ | | | | | | | | | | |
| I118T | | | | | | | | | | |
| Domain 2: ICOSL | | | | | | | | | | |
| N52H/N57Y/Q100P | | | | | | | | | | |
| Domain 1: ICOSL | + | — | SEQ ID | SEQ ID | + | — | SEQ ID | SEQ ID | + | + |
| WT | | | NO: 196 | NO: 233 | | | NO: 152 | NO: 231 | | |
| Domain 2: CD80 | | | | | | | | | | |
| WT | | | | | | | | | | |
| Domain 1: CD86 | + | SEQ | SEQ ID | SEQ ID | + | — | SEQ ID | SEQ ID | + | + |
| WT | | ID | NO: 220 | NO: 237 | | | NO: 152 | NO: 231 | | |
| Domain 2: CD80 | | NO: | | | | | | | | |
| WT | | 236 | | | | | | | | |
| Domain 1: CD80 | + | — | SEQ ID | SEQ ID | + | — | SEQ ID | SEQ ID | + | + |
| R29H/Y31H/T41G/ | | | NO: 192 | NO: 231 | | | NO: 189 | NO: 231 | | |
| Y87N/E88G/K89E/ | | | | | | | | | | |
| D90N/A91G/P109S | | | | | | | | | | |
| Domain 2: CD80 | | | | | | | | | | |
| E88D/K89R/D90K/ | | | | | | | | | | |
| A91G/F92Y/K93R | | | | | | | | | | |
| Domain 1: CD80 | + | — | SEQ ID | SEQ ID | + | — | SEQ ID | SEQ ID | + | + |
| R29H/Y31H/T41G/ | | | NO: 192 | NO: 231 | | | NO: 193 | NO: 231 | | |
| Y87N/E88G/K89E/ | | | | | | | | | | |
| D90N/A91G/P109S | | | | | | | | | | |
| Domain 2: CD80 | | | | | | | | | | |
| A12T/H18L/N43V/ | | | | | | | | | | |
| F59L/E77K/P109S/ | | | | | | | | | | |
| I118T | | | | | | | | | | |
| Domain 1: CD80 | + | — | SEQ ID | SEQ ID | + | — | SEQ ID | SEQ ID | + | + |
| I67T/L70Q/A91G/ | | | NO: 175 | NO: 231 | | | NO: 189 | NO: 231 | | |
| T120S | | | | | | | | | | |
| Domain 2: CD80 | | | | | | | | | | |
| E88D/K89R/D90K/ | | | | | | | | | | |
| A91G/F92Y/K93R | | | | | | | | | | |
| Domain 1: CD80 | + | — | SEQ ID | SEQ ID | + | — | SEQ ID | SEQ ID | + | + |
| I67T/L70Q/A91G/ | | | NO: 175 | NO: 231 | | | NO: 193 | NO: 231 | | |
| T120S | | | | | | | | | | |
| Domain 2: CD80 | | | | | | | | | | |
| A12T/H18L/N43V/ | | | | | | | | | | |
| F59L/E77K/P109S/ | | | | | | | | | | |
| I118T | | | | | | | | | | |
| Domain 1: CD86 | + | SEQ | SEQ ID | SEQ ID | + | — | SEQ ID | SEQ ID | + | + |
| Q35H/H90L/Q102H | | ID | NO: 221 | NO: 237 | | | NO: 189 | NO: 231 | | |
| Domain 2: CD80 | | NO: | | | | | | | | |
| E88D/K89R/D90K/ | | 236 | | | | | | | | |
| A91G/F92Y/K93R | | | | | | | | | | |
| Domain 1: CD86 | + | SEQ | SEQ ID | SEQ ID | + | — | SEQ ID | SEQ ID | + | + |
| Q35H/H90L/Q102H | | ID | NO: 221 | NO: 237 | | | NO: 193 | NO: 231 | | |
| Domain 2: CD80 | | NO: | | | | | | | | |
| A12T/H18L/N43V/ | | 236 | | | | | | | | |
| F59L/E77K/P109S/ | | | | | | | | | | |
| I118T | | | | | | | | | | |
| Domain 1: ICOSL | + | — | SEQ ID | SEQ ID | + | — | SEQ ID | SEQ ID | + | + |
| N52S/N57Y/H94D/ | | | NO: 213 | NO: 233 | | | NO: 189 | NO: 231 | | |
| L96F/L98F/Q100R/ | | | | | | | | | | |
| G103E/ | | | | | | | | | | |
| F120S | | | | | | | | | | |
| Domain 2: CD80 | | | | | | | | | | |
| E88D/K89R/D90K/ | | | | | | | | | | |
| A91G/F92Y/K93R | | | | | | | | | | |
| Domain 1: ICOSL | + | — | SEQ ID | SEQ ID | + | — | SEQ ID | SEQ ID | + | + |
| N52S/N57Y/H94D/ | | | NO: 213 | NO: 233 | | | NO: 193 | NO: 231 | | |
| L96F/L98F/Q100R/ | | | | | | | | | | |
| G103E/ | | | | | | | | | | |
| F120S | | | | | | | | | | |
| Domain 2: CD80 | | | | | | | | | | |
| A12T/H18L/N43V/ | | | | | | | | | | |
| F59L/E77K/P109S/ | | | | | | | | | | |
| I118T | | | | | | | | | | |
| Domain 1: ICOSL | + | — | SEQ ID | SEQ ID | + | — | SEQ ID | SEQ ID | + | + |
| N52D | | | NO: 199 | NO: 233 | | | NO: 189 | NO: 231 | | |
| Domain 2: CD80 | | | | | | | | | | |
| E88D/K89R/D90K/ | | | | | | | | | | |
| A91G/F92Y/K93R | | | | | | | | | | |
| Domain 1: ICOSL | + | — | SEQ ID | SEQ ID | + | — | SEQ ID | SEQ ID | + | + |
| N52D | | | NO: 199 | NO: 233 | | | NO: 193 | NO: 231 | | |
| Domain 2: CD80 | | | | | | | | | | |
| A12T/H18L/N43V/ | | | | | | | | | | |
| F59L/E77K/P109S/ | | | | | | | | | | |
| I118T | | | | | | | | | | |
| Domain 1: ICOSL | + | — | SEQ ID | SEQ ID | + | — | SEQ ID | SEQ ID | + | + |
| N52H/N57Y/Q100P | | | NO: 201 | NO: 233 | | | NO: 189 | NO: 231 | | |
| Domain 2: CD80 | | | | | | | | | | |
| E88D/K89R/D90K/ | | | | | | | | | | |
| A91G/F92Y/K93R | | | | | | | | | | |
| Domain 1: ICOSL | + | — | SEQ ID | SEQ ID | + | — | SEQ ID | SEQ ID | + | + |
| N52H/N57Y/Q100P | | | NO: 201 | NO: 233 | | | NO: 193 | NO: 231 | | |
| Domain 2: CD80 | | | | | | | | | | |
| A12T/H18L/N43V/ | | | | | | | | | | |
| F59L/E77K/P109S/ | | | | | | | | | | |
| I118T | | | | | | | | | | |
| Domain 1: CD80 | + | — | SEQ ID | SEQ ID | + | — | SEQ ID | SEQ ID | + | + |
| V68M/L70P/L72P/ | | | NO: 195 | NO: 231 | | | NO: 189 | NO: 231 | | |
| K86E | | | | | | | | | | |
| Domain 2: CD80 | | | | | | | | | | |
| E88D/K89R/D90K/ | | | | | | | | | | |
| A91G/F92Y/K93R | | | | | | | | | | |
| Domain 1: CD80 | + | — | SEQ ID | SEQ ID | + | — | SEQ ID | SEQ ID | + | + |
| R29V/Y31F/K36G/ | | | NO: 194 | NO: 231 | | | NO: 189 | NO: 231 | | |
| M38L/N43Q/E81R/ | | | | | | | | | | |
| V83I/L85I/K89R/ | | | | | | | | | | |
| D90L/A91E/F92N/ | | | | | | | | | | |
| K93Q/R94G | | | | | | | | | | |
| Domain 2: CD80 | | | | | | | | | | |
| E88D/K89R/D90K/ | | | | | | | | | | |
| A91G/F92Y/K93R | | | | | | | | | | |
| Domain 1: CD80 | + | — | SEQ ID | SEQ ID | + | — | SEQ ID | SEQ ID | + | + |
| V68M/L70P/L72P/ | | | NO: 195 | NO: 231 | | | NO: 193 | NO: 231 | | |
| K86E | | | | | | | | | | |
| Domain 2: CD80 | | | | | | | | | | |
| A12T/H18L/N43V/ | | | | | | | | | | |
| F59L/E77K/P109S/ | | | | | | | | | | |
| I118T | | | | | | | | | | |
| Domain 1: CD80 | + | — | SEQ ID | SEQ ID | + | — | SEQ ID | SEQ ID | + | + |
| R29V/Y31F/K36G/ | | | NO: 194 | NO: 231 | | | NO: 193 | NO: 231 | | |
| M38L/N43Q/E81R/ | | | | | | | | | | |
| V83I/L85I/K89R/ | | | | | | | | | | |
| D90L/A91E/F92N/ | | | | | | | | | | |
| K93Q/R94G | | | | | | | | | | |
| Domain 2: CD80 | | | | | | | | | | |
| A12T/H18L/N43V/ | | | | | | | | | | |
| F59L/E77K/P109S/ | | | | | | | | | | |
| I118T | | | | | | | | | | |
| Domain 1: CD80 | + | — | SEQ ID | SEQ ID | + | — | SEQ ID | SEQ ID | + | + |
| E88D/K89R/D90K/ | | | NO: 189 | NO: 231 | | | NO: 195 | NO: 231 | | |
| A91G/F92Y/K93R | | | | | | | | | | |
| Domain 2: CD80 | | | | | | | | | | |
| V68M/L70P/L72P/ | | | | | | | | | | |
| K86E | | | | | | | | | | |
| Domain 1: CD80 | + | — | SEQ ID | SEQ ID | + | — | SEQ ID | SEQ ID | + | + |
| E88D/K89R/D90K/ | | | NO: 189 | NO: 231 | | | NO: 194 | NO: 231 | | |
| A91G/F92Y/K93R | | | | | | | | | | |
| Domain 2: CD80 | | | | | | | | | | |
| R29V/Y31F/K36G/ | | | | | | | | | | |
| M38L/N43Q/E81R/ | | | | | | | | | | |
| V83I/L85I/K89R/ | | | | | | | | | | |
| D90L/A91E/F92N/ | | | | | | | | | | |
| K93Q/R94G | | | | | | | | | | |
| Domain 1: CD80 | + | — | SEQ ID | SEQ ID | + | — | SEQ ID | SEQ ID | + | + |
| A12T/H18L/N43V/ | | | NO: 193 | NO: 231 | | | NO: 195 | NO: 231 | | |
| F59L/E77K/P109S/ | | | | | | | | | | |
| I118T | | | | | | | | | | |
| Domain 2: CD80 | | | | | | | | | | |
| V68M/L70P/L72P/ | | | | | | | | | | |
| K86E | | | | | | | | | | |
| Domain 1: CD80 | + | — | SEQ ID | SEQ ID | + | — | SEQ ID | SEQ ID | + | + |
| A12T/H18L/N43V/ | | | NO: 193 | NO: 231 | | | NO: 194 | NO: 231 | | |
| F59L/E77K/P109S/ | | | | | | | | | | |
| I118T | | | | | | | | | | |
| Domain 2: CD80 | | | | | | | | | | |
| R29V/Y31F/K36G/ | | | | | | | | | | |
| M38L/N43Q/E81R/ | | | | | | | | | | |
| V83I/ | | | | | | | | | | |
| L85I/K89R/D90L/ | | | | | | | | | | |
| A91E/F92N/K93Q/ | | | | | | | | | | |
| R94G | | | | | | | | | | |
| Domain 1: CD86 | + | SEQ | SEQ ID | SEQ ID | + | — | SEQ ID | SEQ ID | + | + |
| WT | | ID | NO: 220 | NO: 237 | | | NO: 196 | NO: 233 | | |
| Domain 2: ICOSL | | NO: | | | | | | | | |
| WT | | 236 | | | | | | | | |
| Domain 1: CD80 | + | — | SEQ ID | SEQ ID | + | — | SEQ ID | SEQ ID | + | + |
| R29H/Y31H/T41G/ | | | NO: 192 | NO: 231 | | | NO: 213 | NO: 233 | | |
| Y87N/E88G/K89E/ | | | | | | | | | | |
| D90N/A91G/P109S | | | | | | | | | | |
| Domain 2: ICOSL | | | | | | | | | | |
| N52S/N57Y/H94D/ | | | | | | | | | | |
| L96F/L98F/Q100R/ | | | | | | | | | | |
| G103E/ | | | | | | | | | | |
| F120S | | | | | | | | | | |
| Domain 1: CD80 | + | — | SEQ ID | SEQ ID | + | — | SEQ ID | SEQ ID | + | + |
| I67T/L70Q/A91G/ | | | NO: 175 | NO: 231 | | | NO: 213 | NO: 233 | | |
| T120S | | | | | | | | | | |
| Domain 2: ICOSL | | | | | | | | | | |
| N52S/N57Y/H94D/ | | | | | | | | | | |
| L96F/L98F/Q100R/ | | | | | | | | | | |
| G103E/ | | | | | | | | | | |
| F120S | | | | | | | | | | |
| Domain 1: CD80 | + | — | SEQ ID | SEQ ID | + | — | SEQ ID | SEQ ID | + | + |
| R29H/Y31H/T41G/ | | | NO: 192 | NO: 231 | | | NO: 199 | NO: 233 | | |
| Y87N/E88G/K89E/ | | | | | | | | | | |
| D90N/A91G/P109S | | | | | | | | | | |
| Domain 2: ICOSL | | | | | | | | | | |
| N52D | | | | | | | | | | |
| Domain 1: CD80 | + | — | SEQ ID | SEQ ID | + | — | SEQ ID | SEQ ID | + | + |
| I67T/L70Q/A91G/ | | | NO: 175 | NO: 231 | | | NO: 199 | NO: 233 | | |
| T120S | | | | | | | | | | |
| Domain 2: ICOSL | | | | | | | | | | |
| N52D | | | | | | | | | | |
| Domain 1: CD80 | + | — | SEQ ID | SEQ ID | + | — | SEQ ID | SEQ ID | + | + |
| R29H/Y31H/T41G/ | | | NO: 192 | NO: 231 | | | NO: 201 | NO: 233 | | |
| Y87N/E88G/K89E/ | | | | | | | | | | |
| D90N/A91G/P109S | | | | | | | | | | |
| Domain 2: ICOSL | | | | | | | | | | |
| N52H/N57Y/Q100P | | | | | | | | | | |
| Domain 1: CD80 | + | — | SEQ ID | SEQ ID | + | — | SEQ ID | SEQ ID | + | + |
| I67T/L70Q/A91G/ | | | NO: 175 | NO: 231 | | | NO: 201 | NO: 233 | | |
| T190S | | | | | | | | | | |
| Domain 2: ICOSL | | | | | | | | | | |
| N52H/N57Y/Q100P | | | | | | | | | | |
| Domain 1: CD86 | + | SEQ | SEQ ID | SEQ ID | + | — | SEQ ID | SEQ ID | + | + |
| Q35H/H90L/Q102H | | ID | NO: 221 | NO: 237 | | | NO: 213 | NO: 233 | | |
| Domain 2: ICOSL | | NO: | | | | | | | | |
| N52S/N57Y/H94D/ | | 236 | | | | | | | | |
| L96F/L98F/Q100R/ | | | | | | | | | | |
| G103E/ | | | | | | | | | | |
| F120S | | | | | | | | | | |
| Domain 1: CD86 | + | SEQ | SEQ ID | SEQ ID | + | — | SEQ ID | SEQ ID | + | + |
| Q35H/H90L/Q102H | | ID | NO: 221 | NO: 237 | | | NO: 199 | NO: 233 | | |
| Domain 2: ICOSL | | NO: | | | | | | | | |
| N52D | | 236 | | | | | | | | |
| Domain 1: CD86 | + | SEQ | SEQ ID | SEQ ID | + | — | SEQ ID | SEQ ID | + | + |
| Q35H/H90L/Q102H | | ID | NO: 221 | NO: 237 | | | NO: 201 | NO: 233 | | |
| Domain 2: ICOSL | | NO: | | | | | | | | |
| N52H/N57Y/Q100P | | 236 | | | | | | | | |
| Domain 1: ICOSL | + | — | SEQ ID | SEQ ID | + | SEQ | SEQ ID | SEQ ID | + | + |
| WT | | | NO: 196 | NO: 233 | | ID | NO: 220 | NO: 237 | | |
| Domain 2: CD86 | | | | | | NO: | | | | |
| WT | | | | | | 236 | | | | |
| Domain 1: ICOSL | + | — | SEQ ID | SEQ ID | + | — | SEQ ID | SEQ ID | + | + |
| N52S/N57Y/H94D/ | | | NO: 213 | NO: 233 | | | NO: 192 | NO: 231 | | |
| L96F/L98F/Q100R/ | | | | | | | | | | |
| G103E/ | | | | | | | | | | |
| F120S | | | | | | | | | | |
| Domain 2: CD80 | | | | | | | | | | |
| R29H/Y31H/T41G/ | | | | | | | | | | |
| Y87N/E88G/K89E/ | | | | | | | | | | |
| D90N/A91G/P109S | | | | | | | | | | |
| Domain 1: ICOSL | + | — | SEQ ID | SEQ ID | + | — | SEQ ID | SEQ ID | + | + |
| N52S/N57Y/H94D/ | | | NO: 213 | NO: 233 | | | NO: 175 | NO: 231 | + | |
| L96F/L98F/Q100R/ | | | | | | | | | | |
| G103E/ | | | | | | | | | | |
| F120S | | | | | | | | | | |
| Domain 2: CD80 | | | | | | | | | | |
| I67T/L70Q/A91G/ | | | | | | | | | | |
| T120S | | | | | | | | | | |
| Domain 1: ICOSL | + | — | SEQ ID | SEQ ID | + | — | SEQ ID | SEQ ID | + | + |
| N52D | | | NO: 199 | NO: 233 | | | NO: 192 | NO: 231 | | |
| Domain 2: CD80 | | | | | | | | | | |
| R29H/Y31H/T41G/ | | | | | | | | | | |
| Y87N/E88G/K89E/ | | | | | | | | | | |
| D90N/A91G/P109S | | | | | | | | | | |
| Domain 1: ICOSL | + | — | SEQ ID | SEQ ID | + | — | SEQ ID | SEQ ID | + | + |
| N52D | | | NO: 199 | NO: 233 | | | NO: 175 | NO: 231 | | |
| Domain 2: CD80 | | | | | | | | | | |
| I67T/L70Q/A91G/ | | | | | | | | | | |
| T120S | | | | | | | | | | |
| Domain 1: ICOSL | + | — | SEQ ID | SEQ ID | + | — | SEQ ID | SEQ ID | + | + |
| N52H/N57Y/Q100P | | | NO: 201 | NO: 233 | | | NO: 192 | NO: 231 | | |
| Domain 2: CD80 | | | | | | | | | | |
| R29H/Y31H/T41G/ | | | | | | | | | | |
| Y87N/E88G/K89E/ | | | | | | | | | | |
| D90N/A91G/P109S | | | | | | | | | | |
| Domain 1: ICOSL | + | — | SEQ ID | SEQ ID | + | SEQ | SEQ ID | SEQ ID | + | + |
| N52S/N57Y/H94D/ | | | NO: 213 | NO: 233 | | ID | NO: 221 | NO: 237 | | |
| L96F/L98F/Q100R/ | | | | | | NO: | | | | |
| G103E/ | | | | | | 236 | | | | |
| F120S | | | | | | | | | | |
| Domain 2: CD86 | | | | | | | | | | |
| Q35H/H90L/Q102H | | | | | | | | | | |
| Domain 1: ICOSL | + | — | SEQ ID | SEQ ID | + | SEQ | SEQ ID | SEQ ID | + | + |
| N52D | | | NO: 199 | NO: 233 | | ID | NO: 221 | NO: 237 | | |
| Domain 2: CD86 | | | | | | NO: | | | | |
| Q35H/H90L/Q102H | | | | | | 236 | | | | |
| Domain 1: ICOSL | + | — | SEQ ID | SEQ ID | + | SEQ | SEQ ID | SEQ ID | + | + |
| N52H/N57Y/Q100P | | | NO: 201 | NO: 233 | | ID | NO: 221 | NO: 237 | | |
| Domain 2: CD86 | | | | | | NO: | | | | |
| Q35H/H90L/Q102H | | | | | | 236 | | | | |

[0434] High throughput expression and purification of the variant IgV-stacked-Fc fusion molecules containing various combinations of variant IgV domains from CD80, CD86, ICOSL or Nkp30 containing at least one affinity-modified IgV domain were generated as described in Example 5. Binding of the variant IgV-stacked-Fc fusion molecules to respective counter structures and functional activity by anti-CD3 coimmobilization assay also were assessed as described in Example 6. For example, costimulatory bioactivity of the stacked IgSF Fc fusion proteins was determined in a similar immobilized anti-CD3 assay as above. In this case, 4 nM of anti-CD3 (OKT3, Biolegend, USA) was coimmobilized with 4 nM to 120 nM of human rB7-H6.Fc (R&D Systems, USA) or human rPD-L1.Fc (R&D Systems, USA) overnight on tissue-culture treated 96 well plates (Corning, USA). The following day unbound protein was washed off with PBS and 100,000 purified pan T cells were added to each well in 100 ul Ex-Vivo 15 media (Lonza, Switzerland). The stacked IgSF domains were subsequently added at concentrations ranging from 8 nM to 40 nM in a volume of 100 ul for 200 ul volume total. Cells were cultured 3 days before harvesting culture supernatants and measuring human IFN-gamma levels with Duoset ELISA kit (R&D Systems, USA) as mentioned above.

[0435] The results are set forth in Tables 12-16. Specifically, Table 12 sets forth binding and functional activity results for variant IgV-stacked-Fc fusion molecules containing an NKp30 IgV domain and an ICOSL IgV domain. Table 13 sets forth binding and functional activity results for variant IgV-stacked-Fv fusion molecules containing an Nkp30 IgV domain and a CD80 or CD86 IgV domain. Table 14 sets forth binding and functional activity results for variant IgV-stacked-Fc fusion molecules containing a variant CD80 IgV domain and a CD80, CD86 or ICOSL IgV domain. Table 15 sets forth binding and functional activity results for variant IgV-stacked-Fc fusion molecules containing two variant CD80 IgV domains. Table 16 sets forth results for variant IgV-stacked Fc fusion molecules containing a variant CD80 or CD86 IgV domain and a variant ICOSL IgV domain.

[0436] For each of Tables 12-16, Column 1 indicates the structural organization and orientation of the stacked, affinity modified or wild-type (WT) domains beginning with the amino terminal (N terminal) domain, followed by the middle WT or affinity modified domain located before the C terminal human IgG1 Fc domains. Column 2 sets forth the SEQ ID NO identifier for the sequence of each IgV domain contained in a respective “stack” molecule. Column 3 shows the binding partners which the indicated affinity modified stacked domains from column 1 were selected against.

[0437] Also shown is the binding activity as measured by the Mean Fluorescence Intensity (MFI) value for binding of each stack molecule to cells engineered to express various counter structure ligands and the ratio of the MFI compared to the binding of the corresponding stack molecule containing unmodified IgV domains not containing the amino acid substitution(s) to the same cell-expressed counter structure ligand. The functional activity of the variant stack molecules to modulate the activity of T cells also is shown based on the calculated levels of IFN-gamma in culture supernatants (pg/ml) generated with the indicated variant stack molecule in solution and the appropriate ligand coimmoblized with anti-CD3 as described in Example 6. The Tables also depict the ratio of IFN-gamma produced by each variant stack molecule compared to the corresponding unmodified stack molecule in the coimmobilization assay.

[0438] As shown, the results showed that it was possible to generate stack molecules containing at least one variant IgSF domains that exhibited affinity-modified activity of increased binding for at least one cognate counter structure ligand compared to a corresponding stack molecule containing the respective unmodified (e.g. wild-type) IgV domain. In some cases, the stack molecule, either from one or a combination of both variant IgSF domains in the molecule, exhibited increased binding for more than one cognate counter structure ligand. The results also showed that the order of the IgV domains in the stacked molecules could, in some cases, alter the degree of improved binding activity. In some cases, functional T cell activity also was altered when assessed in the targeted coimmobilization assay.

TABLE 12
Stacked variant IgV Fc fusion proteins containing an NKp30 IgV domain and an ICOSL IgV domain

| | | | | | | Anti-CD3 |
|---|---|---|---|---|---|---|
| | | | | | | coimmobilization |
| | | | Binding Activity | | | assay |
| | | Counter | B7H6 MFI | ICOS MFI | CD28 MFI | pg/ml IFN- |
| Domain Structure | SEQ ID | structure | (WT | (WT | (WT | gamma |
| N terminal to C terminal: | NO | selected | parental | parental | parental | (WT parental IFN- |
| domain 1/domain 2/Fc | (IgV) | against | MFI ratio) | MFI ratio) | MFI ratio) | gamma ratio) |
| Domain 1: NKp30 WT | 214 | — | 64538 | 26235 | 6337 | 235 |
| Domain 2: ICOSL WT | 196 | | (1.00) | (1.00) | (1.00) | (1.00) |
| Domain 1: NKp30 (L30V | 215 | B7-H6 | 59684 | 12762 | 9775 | 214 |
| A60V S64P S86G) | | | (0.92) | (0.49) | (1.54) | (0.91) |
| Domain 2: ICOSL (N52S | 212 | ICOS- | | | | |
| N57Y H94D L96F L98F | | CD28 | | | | |
| Q100R) | | | | | | |
| Domain 1: NKp30 (L30V | 215 | B7-H6 | 65470 | 30272 | 9505 | 219 |
| A60V S64P S86G) | | | (1.01) | (1.15) | (1.50) | (0.93) |
| Domain 2: ICOSL (N52D) | 199 | ICOS- | | | | |
| | | CD28 | | | | |
| Domain 1: NKp30 (L30V | 215 | B7-H6 | 38153 | 27903 | 11300 | 189 |
| A60V S64P S86G)/ | | | (0.59) | (1.06) | (1.78) | (0.80) |
| Domain 2: ICOSL (N52H | 201 | ICOS- | | | | |
| N57Y Q100P) | | CD28 | | | | |
| Domain 1: ICOSL WT | 196 | — | 117853 | 70320 | 7916 | 231 |
| Domain 2: Nkp30 WT | 214 | | (1.0) | (1.0) | (1.0) | (1.0) |
| Domain 1: ICOSL (N52D) | 199 | ICOS- | 100396 | 83912 | 20778 | 228 |
| | | CD28 | (0.85) | (1.19) | (2.62) | (0.98) |
| Domain 2: NKp30 (L30V | 215 | B7-H6 | | | | |
| A60V S64P S86G) | | | | | | |
| Domain 1: ICOSL (N52H | 201 | ICOS- | 82792 | 68874 | 72269 | 561 |
| N57Y Q100P) | | CD28 | (0.70) | (0.98) | (9.12) | (2.43) |
| Domain 2: NKp30 (L30V | 215 | B7-H6 | | | | |
| A60V S64P S86G) | | | | | | |

TABLE 13
Stacked variant IgV Fc fusion proteins containing an NKp30 IgV domain and a CD80 or CD86 IgV domain

| | | | | | | | Anti-CD3 | |
|---|---|---|---|---|---|---|---|---|
| | | | | | | | coimmobilization | |
| | | Counter | Binding Activity | | | | assay | |
| Domain Structure | SEQ ID | structure | B7H6 MFI | | CD28 MFI | | pg/ml IFN-gamma | |
| N terminal to C terminal: | NO | selected | (WT parental | | (WT parental | | (WT parental IFN- | |
| domain 1/domain 2/Fc | (IgV) | against | MFI ratio) | | MFI ratio) | | gamma ratio) | |
| Domain 1: NKp30 WT | 214 | — | 88823 | (1.00) | 7022 | (1.00) | 68 | (1.00) |
| Domain 2: CD80 WT | 152 | | | | | | | |
| Domain 1: NKp30 WT | 214 | — | 14052 | (1.00) | 1690 | (1.00) | 92 | (1.00) |
| Domain 2: CD86 WT | 220 | | | | | | | |
| Domain 1: NKp30 (L30V | 215 | B7-H6 | 53279 | (0.60) | 9027 | (1.29) | 94 | (1.38) |
| A60V S64P S86G) | | | | | | | | |
| Domain 2: CD80 | 192 | CD28 | | | | | | |
| R29H/Y31H/T41G/Y87N/E88G/ | | | | | | | | |
| K89E/D90N/A91G/P109S | | | | | | | | |
| Domain 1: NKp30 (L30V | 215 | B7-H6 | 41370 | (0.47) | 11240 | (1.60) | 60 | (0.88) |
| A60V S64P S86G) | | | | | | | | |
| Domain 2: CD80 | 175 | CD28 | | | | | | |
| I67T/L70Q/A91G/T120S | | | | | | | | |
| Domain 1: NKp30 (L30V | 215 | B7-H6 | 68480 | (4.87) | 9115 | (5.39) | 110 | (1.19) |
| A60V S64P S86G)/ | | | | | | | | |
| Domain 2: CD86 | 221 | CD28 | | | | | | |
| Q35H/H90L/Q102H | | | | | | | | |
| Domain 1: CD80 WT | 152 | — | 110461 | (1.00) | 13654 | (1.00) | 288 | (1.00) |
| Domain 2: Nkp30 WT | 214 | | | | | | | |
| Domain 1: CD86 WT | 220 | CD28 | 128899 | (1.00) | 26467 | (1.00) | 213 | (1.00) |
| Domain 2: Nkp30 WT | 214 | B7-H6 | | | | | | |
| Domain 1: CD80 | 192 | CD28 | 55727 | (0.50) | 4342 | (0.32) | 100 | (0.35) |
| R29H/Y31H/T41G/Y87N/E88G/ | | | | | | | | |
| K89E/D90N/A91G/P109S | | | | | | | | |
| Domain 2: NKp30 (L30V | 215 | B7-H6 | | | | | | |
| A60V S64P S86G) | | | | | | | | |
| Domain 1: CD80 | 175 | CD28 | 40412 | (0.37) | 7094 | (0.52) | 84 | (0.29) |
| I67T/L70Q/A91G/T120S | | | | | | | | |
| Domain 2: NKp30 (L30V | 215 | B7-H6 | | | | | | |
| A60V S64P S86G) | | | | | | | | |
| Domain 1: CD86 | 221 | CD28 | 220836 | (1.71) | 11590 | (0.44) | 113 | (0.53) |
| Q35H/H90L/Q102H | | | | | | | | |
| Domain 2: NKp30 (L30V | 215 | B7-H6 | | | | | | |
| A60V S64P S86G) | | | | | | | | |

TABLE 14
Stacked variant IgV Fc fusion proteins containing a CD80 IgV domain and a CD80, CD86, or ICOSL IgV domain

| | | | | | | Anti-CD3 |
|---|---|---|---|---|---|---|
| | | | Binding Activity | | | coimmobilization |
| | | | | PD-L1 | | assay |
| | | Counter | CD28 MFI | MFI | ICOS MFI | pg/ml IFN- |
| Domain Structure | SEQ ID | structure | (WT | (WT | (WT | gamma |
| N terminal to C terminal: | NO | selected | parental | parental | parental | (WT parental IFN- |
| domain 1/domain 2/Fc | (IgV) | against | MFI ratio) | MFI ratio) | MFI ratio) | gamma ratio) |
| Domain 1: CD80 WT | 152 | | 1230 | 2657 | 11122 | 69 |
| Domain 2: ICOSL WT | 196 | | (1.00) | (1.00) | (1.00) | (1.00) |
| Domain 1: CD80 WT | 152 | | 60278 | 2085 | | 59 |
| Domain 2: CD86 WT | 220 | | (1.00) | (1.00) | | (1.00) |
| Domain 1: CD80 WT | 152 | | 1634 | 6297 | | 98 |
| Domain 2: CD80 WT | 152 | | (1.00) | (1.00) | | (1.00) |
| Domain 1: CD80 | 189 | PD-L1 | 4308 | 4234 | | 214 |
| E88D/K89R/D90K/A91G/F92Y/ | | | (2.64) | (0.67) | | (2.18) |
| K93R | | | | | | |
| Domain 2: CD80 | 192 | CD28 | | | | |
| R29H/Y31H/T41G/Y87N/E88G/ | | | | | | |
| K89E/D90N/A91G/P109S | | | | | | |
| Domain 1: CD80 | 193 | PD-L1 | 7613 | 2030 | | 137 |
| A12T/H18L/N43V/F59L/E77K/ | | | (4.66) | (0.32) | | (1.40) |
| P109S/I118T | | | | | | |
| Domain 2: CD80 | 192 | CD28 | | | | |
| R29H/Y31H/T41G/Y87N/E88G/ | | | | | | |
| K89E/D90N/A91G/P109S | | | | | | |
| Domain 1: CD80 | 193 | PD-L1 | 3851 | 3657 | | 81 |
| A12T/H18L/N43V/F59L/E77K/ | | | (2.36) | (0.58) | | (0.83) |
| P109S/I118T | | | | | | |
| Domain 2: CD80 | 175 | CD28 | | | | |
| I67T/L70Q/A91G/T120S | | | | | | |
| Domain 1: CD80 | 189 | PD-L1 | 4117 | 2914 | | 96 |
| E88D/K89R/D90K/A91G/F92Y/ | | | (0.07) | (1.40) | | (1.63) |
| K93R | | | | | | |
| Domain 2: CD86 | 221 | CD28 | | | | |
| Q35H/H90L/Q102H | | | | | | |
| Domain 1: CD80 | 193 | PD-L1 | 2868 | 3611 | | 94 |
| A12T/H18L/N43V/F59L/E77K/ | | | (0.05) | (1.73) | | (1.60) |
| P109S/I118T | | | | | | |
| Domain 2: CD86 | 221 | CD28 | | | | |
| Q35H/H90L/Q102H | | | | | | |
| Domain 1: CD80 | 189 | PD-L1 | 3383 | 4515 | 5158 | 90 |
| E88D/K89R/D90K/A91G/F92Y/ | | | (2.75) | (1.70) | (0.46) | (1.30) |
| K93R | | | | | | |
| Domain 2: ICOSL | 213 | ICOS/CD28 | | | | |
| N52S/N57Y/H94D/L96F/L98F/ | | | | | | |
| Q100R/G103E/ | | | | | | |
| F120S | | | | | | |
| Domain 1: CD80 | 193 | PD-L1 | 2230 | 2148 | 3860 | 112 |
| A12T/H18L/N43V/F59L/E77K/ | | | (1.81) | (0.81) | (0.35) | (1.62) |
| P109S/I118T | | | | | | |
| Domain 2: ICOSL | 213 | ICOS/CD28 | | | | |
| N52S/N57Y/H94D/L96F/L98F/ | | | | | | |
| Q100R/G103E/ | | | | | | |
| F120S | | | | | | |
| Domain 1: CD80 | 193 | PD-L1 | 5665 | 6446 | 15730 | 126 |
| A12T/H18L/N43V/F59L/E77K/ | | | (4.61) | (2.43) | (1.41) | (1.83) |
| P109S/I118T | | | | | | |
| Domain 2: ICOSL | 199 | ICOS/CD28 | | | | |
| N52D | | | | | | |
| Domain 1: CD80 | 189 | PD-L1 | 6260 | 4543 | 11995 | 269 |
| E88D/K89R/D90K/A91G/F92Y/ | | | (5.09) | (1.71) | (1.08) | (3.90) |
| K93R | | | | | | |
| Domain 2: ICOSL | 201 | ICOS/CD28 | | | | |
| N52H/N57Y/Q100P | | | | | | |
| Domain 1: CD80 | 193 | PD-L1 | 3359 | 3874 | 8541 | 97 |
| A12T/H18L/N43V/F59L/E77K/ | | | (2.73) | (1.46) | (0.77) | (1.41) |
| P109S/I118T | | | | | | |
| Domain 2: ICOSL | 201 | ICOS/CD28 | | | | |
| N52H/N57Y/Q100P | | | | | | |
| Domain 1: ICOSL WT | 196 | | 3000 | 2966 | 14366 | 101 |
| Domain 2: CD80 WT | 152 | | (1.00) | (1.00) | (1.00) | (1.00) |
| Domain 1: CD86 WT | 220 | | 4946 | 1517 | | 125 |
| Domain 2: CD80 WT | 152 | | (1.00) | (1.00) | | (1.00) |
| Domain 1: CD80 | 192 | CD28 | 2832 | 3672 | | 114 |
| R29H/Y31H/T41G/Y87N/E88G/ | | | (1.73) | (0.58) | | (1.16) |
| K89E/D90N/A91G/P109S | | | | | | |
| Domain 2: CD80 | 189 | PD-L1 | | | | |
| E88D/K89R/D90K/A91G/F92Y/ | | | | | | |
| K93R | | | | | | |
| Domain 1: CD80 | 192 | CD28 | 4542 | 2878 | | 142 |
| R29H/Y31H/T41G/Y87N/E88G/ | | | (2.78) | (0.45) | | (1.45) |
| K89E/D90N/A91G/P109S | | | | | | |
| Domain 2: CD80 | 193 | PD-L1 | | | | |
| A12T/H18L/N43V/F59L/E77K/ | | | | | | |
| P109S/I118T | | | | | | |
| Domain 1: CD80 | 175 | CD28 | 938 | 995 | | 102 |
| I67T/L70Q/A91G/T120S | | | (0.57) | (0.16) | | (1.04) |
| Domain 2: CD80 | 189 | PD-L1 | | | | |
| E88D/K89R/D90K/A91G/F92Y/ | | | | | | |
| K93R | | | | | | |
| Domain 1: CD80 | 175 | CD28 | 4153 | 2827 | | 108 |
| I67T/L70Q/A91G/T120S | | | (2.54) | (0.45) | | (1.10) |
| Domain 2: CD80 | 193 | PD-L1 | | | | |
| A12T/H18L/N43V/F59L/E77K/ | | | | | | |
| P109S/I118T | | | | | | |
| Domain 1: CD86 | 221 | CD28 | 14608 | 2535 | | 257 |
| Q35H/H90L/Q102H | | | (2.95) | (1.67) | | (2.06) |
| Domain 2: CD80 | 189 | PD-L1 | | | | |
| E88D/K89R/D90K/A91G/F92Y/ | | | | | | |
| K93R | | | | | | |
| Domain 1: CD86 | 221 | CD28 | 2088 | 2110 | | 101 |
| Q35H/H90L/Q102H | | | (0.42) | (1.39) | | (0.81) |
| Domain 2: CD80 | 193 | PD-L1 | | | | |
| A12T/H18L/N43V/F59L/E77K/ | | | | | | |
| P109S/I118T | | | | | | |
| Domain 1: ICOSL | 213 | ICOS/CD28 | 3634 | 4893 | 6403 | 123 |
| N52S/N57Y/H94D/L96F/L98F/ | | | (1.21) | (1.65) | (0.45) | (1.22) |
| Q100R/G103E/ | | | | | | |
| F120S | | | | | | |
| Domain 2: CD80 | 189 | PD-L1 | | | | |
| E88D/K89R/D90K/A91G/F92Y/ | | | | | | |
| K93R | | | | | | |
| Domain 1: ICOSL | 213 | ICOS/CD28 | 1095 | 5929 | 7923 | 127 |
| N52S/N57Y/H94D/L96F/L98F/ | | | (0.37) | (2.0) | (0.55) | (1.26) |
| Q100R/G103E/ | | | | | | |
| F120S | | | | | | |
| Domain 2: CD80 | 193 | PD-L1 | | | | |
| A12T/H18L/N43V/F59L/E77K/ | | | | | | |
| P109S/I118T | | | | | | |
| Domain 1: ICOSL | 199 | ICOSL/CD28 | 2023 | 5093 | 16987 | 125 |
| N52D | | | (0.67) | (1.72) | (1.18) | (1.24) |
| Domain 2: CD80 | 189 | PD-L1 | | | | |
| E88D/K89R/D90K/A91G/F92Y/ | | | | | | |
| K93R | | | | | | |
| Domain 1: ICOSL | 199 | ICOS/CD28 | 3441 | 3414 | 20889 | 165 |
| N52D | | | (1.15) | (1.15) | (1.45) | (1.63) |
| Domain 2: CD80 | 193 | PD-L1 | | | | |
| A12T/H18L/N43V/F59L/E77K/ | | | | | | |
| P109S/I118T | | | | | | |
| Domain 1: ICOSL | 201 | ICOS/CD28 | 7835 | 6634 | 20779 | 95 |
| N52H/N57Y/Q100P | | | (2.61) | (2.24) | (1.45) | (0.94) |
| Domain 2: CD80 | 189 | PD-L1 | | | | |
| E88D/K89R/D90K/A91G/F92Y/ | | | | | | |
| K93R | | | | | | |
| Domain 1: ICOSL | 201 | ICOS/CD28 | 8472 | 3789 | 13974 | 106 |
| N52H/N57Y/Q100P | | | (2.82) | (1.28) | (0.97) | (1.05) |
| Domain 2: CD80 | 193 | PD-L1 | | | | |
| A12T/H18L/N43V/F59L/E77K/ | | | | | | |
| P109S/I118T | | | | | | |

TABLE 15
Stacked variant IgV Fc fusion proteins containing two CD80 IgV domains

| | | Counter | Binding Activity | | | | Functional | |
|---|---|---|---|---|---|---|---|---|
| Domain Structure | SEQ ID | structure | PD-L1 MFI | | CTLA-4 MFI | | Activity MLR | |
| N terminal to C terminal: | NO | selected | (WT parental | | (WT parental | | IFN-gamma | |
| domain 1/domain 2/Fc | (IgV) | against | MFI ratio) | | MFI ratio) | | pg/ml | |
| Domain 1: CD80 WT | 152 | | 6297 | (1.00) | 4698 | (1.00) | 35166 | (1.00) |
| Domain 2: CD80 WT | 152 | | | | | | | |
| Domain 1: CD80 | 195 | CTLA-4 | 2464 | (0.39) | 4955 | (1.05) | 5705 | (0.16) |
| V68M/L70P/L72P/K86E | | | | | | | | |
| Domain 2: CD80 | 189 | PD-L1 | | | | | | |
| E88D/K89R/D90K/A91G/ | | | | | | | | |
| F92Y/K93R | | | | | | | | |
| Domain 1: CD80 | 194 | CTLA-4 | 1928 | (0.31) | 1992 | (0.42) | 1560 | (0.04) |
| R29V/Y31F/K36G/M38L/N43Q/ | | | | | | | | |
| E81R/V83I/L85I/K89R/D90L/ | | | | | | | | |
| A91E/F92N/K93Q/R94G | | | | | | | | |
| Domain 2: CD80 | 189 | PD-L1 | | | | | | |
| E88D/K89R/D90K/A91G/ | | | | | | | | |
| F92Y/K93R | | | | | | | | |
| Domain 1: CD80 | 195 | CTLA-4 | 1215 | (0.19) | 1382 | (0.29) | 2171 | (0.06) |
| V68M/L70P/L72P/K86E | | | | | | | | |
| Domain 2: CD80 | 193 | PD-L1 | | | | | | |
| A12T/H18L/N43V/F59L/ | | | | | | | | |
| E77K/P109S/I118T | | | | | | | | |
| Domain 1: CD80 | 194 | CTLA-4 | 1592 | (0.25) | 1962 | (0.42) | 1512 | (0.04) |
| R29V/Y31F/K36G/M38L/N43Q/ | | | | | | | | |
| E81R/V83I/L85I/K89R/D90L/ | | | | | | | | |
| A91E/F92N/K93Q/R94G | | | | | | | | |
| Domain 2: CD80 | 193 | PD-L1 | | | | | | |
| A12T/H18L/N43V/F59L/E77K/ | | | | | | | | |
| P109S/I118T | | | | | | | | |
| Domain 1: CD80 | 189 | PD-L1 | 1747 | (0.28) | 2057 | (0.44) | 9739 | (0.28) |
| E88D/K89R/D90K/A91G/ | | | | | | | | |
| F92Y/K93R | | | | | | | | |
| Domain 2: CD80 | 195 | CTLA-4 | | | | | | |
| V68M/L70P/L72P/K86E | | | | | | | | |
| Domain 1: CD80 | 189 | PD-L1 | 1752 | (0.28) | 1772 | (0.38) | 5412 | (0.15) |
| E88D/K89R/D90K/A91G/ | | | | | | | | |
| F92Y/K93R | | | | | | | | |
| Domain 2: CD80 | 194 | CTLA-4 | | | | | | |
| R29V/Y31F/K36G/M38L/N43Q/ | | | | | | | | |
| E81R/V83I/L85I/K89R/D90L/ | | | | | | | | |
| A91E/F92N/K93Q/R94G | | | | | | | | |
| Domain 1: CD80 | 193 | PD-L1 | 1636 | (0.26) | 1887 | (0.40) | 7608 | (0.22) |
| A12T/H18L/N43V/F59L/E77K/ | | | | | | | | |
| P109S/I118T | | | | | | | | |
| Domain 2: CD80 | 195 | CTLA-4 | | | | | | |
| V68M/L70P/L72P/K86E | | | | | | | | |
| Domain 1: CD80 | 193 | PD-L1 | 2037 | (0.32) | 4822 | (1.03) | 11158 | (0.32) |
| A12T/H18L/N43V/F59L/E77K/ | | | | | | | | |
| P109S/I118T | | | | | | | | |
| Domain 2: CD80 | 194 | CTLA-4 | | | | | | |
| R29V/Y31F/K36G/M38L/N43Q/ | | | | | | | | |
| E81R/V83I/L85I/K89R/D90L/ | | | | | | | | |
| A91E/F92N/K93Q/R94G | | | | | | | | |

TABLE 16
Stacked variant IgV Fc fusion proteins containing a CD80 or CD86 IgV domain and an ICOSL IgV domain

| | | Counter | Binding Activity | | | | Functional | |
|---|---|---|---|---|---|---|---|---|
| Domain Structure | SEQ ID | structure | PD-L1 MFI | | CTLA-4 MFI | | Activity MLR | |
| N terminal to C terminal: | NO | selected | (WT parental | | (WT parental | | IFN-gamma | |
| domain 1/domain 2/Fc | (IgV) | against | MFI ratio) | | MFI ratio) | | pg/ml | |
| Domain 1: CD80 WT | 152 | | 1230 | (1.00) | 11122 | (1.00) | 1756 | (1.00) |
| Domain 2: ICOSL WT | 196 | | | | | | | |
| Domain 1: CD86 WT | 220 | | 29343 | (1.00) | 55193 | (1.00) | 6305 | (1.00) |
| Domain 2: ICOSL WT | 196 | | | | | | | |
| Domain 1: CD80 | 192 | CD28 | 2280 | (1.85) | 3181 | (0.29) | 2281 | (1.30) |
| R29H/Y31H/T41G/Y87N/E88G/ | | | | | | | | |
| K89E/D90N/A91G/P109S | | | | | | | | |
| Domain 2: ICOSL | 213 | ICOS/CD28 | | | | | | |
| N52S/N57Y/H94D/L96F/L98F/ | | | | | | | | |
| Q100R/G103E/F120S | | | | | | | | |
| Domain 1: CD80 | 175 | CD28 | 2309 | (1.88) | 26982 | (2.43) | 1561 | (0.89) |
| I67T/L70Q/A91G/T120S | | | | | | | | |
| Domain 2: ICOSL | 213 | ICOS/CD28 | | | | | | |
| N52S/N57Y/H94D/L96F/L98F/ | | | | | | | | |
| Q100R/G103E/F120S | | | | | | | | |
| Domain 1: CD80 | 192 | CD28 | 4285 | (3.48) | 22744 | (2.04) | 1612 | (0.92) |
| R29H/Y31H/T41G/Y87N/E88G/ | | | | | | | | |
| K89E/D90N/A91G/P109S | | | | | | | | |
| Domain 2: ICOSL | 199 | ICOS/CD28 | | | | | | |
| N52D | | | | | | | | |
| Domain 1: CD80 | 175 | CD28 | 3024 | (2.46) | 16916 | (1.52) | 3857 | (2.20) |
| I67T/L70Q/A91G/T120S | | | | | | | | |
| Domain 2: ICOSL | 199 | ICOS/CD28 | | | | | | |
| N52D | | | | | | | | |
| Domain 1: CD80 | 192 | CD28 | 6503 | (5.29) | 7240 | (0.65) | 6886 | (3.92) |
| R29H/Y31H/T41G/Y87N/E88G/ | | | | | | | | |
| K89E/D90N/A91G/P109S | | | | | | | | |
| Domain 2: ICOSL | 201 | ICOS/CD28 | | | | | | |
| N52H/N57Y/Q100P | | | | | | | | |
| Domain 1: CD80 | 175 | CD28 | 3110 | (2.53) | 4848 | (0.44) | 3393 | (1.93) |
| I67T/L70Q/A91G/T120S | | | | | | | | |
| Domain 2: ICOSL | 201 | ICOS/CD28 | | | | | | |
| N52H/N57Y/Q100P | | | | | | | | |
| Domain 1: CD86 | 221 | CD28 | | | | | | |
| Q35H/H90L/Q102H | | | | | | | | |
| Domain 2: ICOSL | 213 | ICOS/CD28 | 11662 | (0.40) | 21165 | (0.38) | 880 | (0.14) |
| N52S/N57Y/H94D/L96F/L98F/ | | | | | | | | |
| Q100R/G103E/F120S | | | | | | | | |
| Domain 1: CD86 | 221 | CD28 | 24230 | (0.83) | 73287 | (1.33) | 1110 | (0.18) |
| Q35H/H90L/Q102H | | | | | | | | |
| Domain 2: ICOSL | 199 | ICOS/CD28 | | | | | | |
| N52D | | | | | | | | |
| Domain 1: CD86 | 221 | CD28 | 1962 | (0.07) | 1630 | (0.03) | 587 | (0.09) |
| Q35H/H90L/Q102H | | ICOS/CD28 | | | | | | |
| Domain 2: ICOSL | 201 | | | | | | | |
| N52H/N57Y/Q100P | | | | | | | | |
| Domain 1: ICOSL WT | 196 | | 3000 | (1.00) | 14366 | (1.00) | 4113 | (1.00) |
| Domain 2: CD80 WT | 152 | | | | | | | |
| Domain 1: ICOSL WT | 196 | | 18005 | (1.00) | 53602 | (1.00) | 18393 | (1.00) |
| Domain 2: CD86 WT | 220 | | | | | | | |
| Domain 1: ICOSL | 213 | ICOSL/CD28 | 10426 | (3.48) | 51286 | (3.57) | 18680 | (4.54) |
| N52S/N57Y/H94D/L96F/L98F/ | | | | | | | | |
| Q100R/G103E/F120S | | | | | | | | |
| Domain 2: CD80 | 192 | CD28 | | | | | | |
| R29H/Y31H/T41G/Y87N/E88G/ | | | | | | | | |
| K89E/D90N/A91G/P109S | | | | | | | | |
| Domain 1: ICOSL | 213 | ICOS/CD28 | 17751 | (5.92) | 29790 | (2.07) | 10637 | (2.59) |
| N52S/N57Y/H94D/L96F/L98F/ | | | | | | | | |
| Q100R/G103E/F120S | | | | | | | | |
| Domain 2: CD80 | 175 | CD28 | | | | | | |
| I67T/L70Q/A91G/T120S | | | | | | | | |
| Domain 1: ICOSL | 199 | ICOS/CD28 | 2788 | (0.93) | 25870 | (1.80) | 6205 | (1.51) |
| N52D | | | | | | | | |
| Domain 2: CD80 | 192 | CD28 | | | | | | |
| R29H/Y31H/T41G/Y87N/E88G/ | | | | | | | | |
| K89E/D90N/A91G/P109S | | | | | | | | |
| Domain 1: ICOSL | 199 | ICOS/CD28 | 2522 | (0.84) | 13569 | (0.94) | 5447 | (1.32) |
| N52D | | | | | | | | |
| Domain 2: CD80 | 175 | CD28 | | | | | | |
| I67T/L70Q/A91G/T120S | | | | | | | | |
| Domain 1: ICOSL | 201 | ICOS/CD28 | | | | | | |
| N52H/N57Y/Q100P | | | | | | | | |
| Domain 2: CD80 | 192 | CD28 | 9701 | (3.23) | 9187 | (0.64) | 5690 | (1.38) |
| R29H/Y31H/T41G/Y87N/E88G/ | | | | | | | | |
| K89E/D90N/A91G/P109S | | | | | | | | |
| Domain 1: ICOSL | 213 | ICOS/CD28 | 27050 | (1.50) | 21257 | (0.40) | 8131 | (0.44) |
| N52S/N57Y/H94D/L96F/L98F/ | | | | | | | | |
| Q100R/G103E/F120S | | | | | | | | |
| Domain 2: CD86 | 221 | CD28 | | | | | | |
| Q35H/H90L/Q102H | | | | | | | | |
| Domain 1: ICOSL | 199 | ICOS/CD28 | 34803 | (1.93) | 80210 | (1.50) | 6747 | (0.37) |
| N52D | | | | | | | | |
| Domain 2: CD86 | 221 | CD28 | | | | | | |
| Q35H/H90L/Q102H | | | | | | | | |
| Domain 1: ICOSL | 201 | ICOS/CD28 | 5948 | (0.33) | 4268 | (0.08) | 26219 | (1.43) |
| N52H/N57Y/Q100P | | | | | | | | |
| Domain 2: CD86 | 221 | CD28 | | | | | | |
| Q35H/H90L/Q102H | | | | | | | | |

### Example 9: Generation, Selection and Screening of Affinity-Modified IgSF Domain Variants of CD155

[0439] Affinity-modified IgSF domain variants of CD155 were generated substantially as described in Examples 1-6 above with some slight modifications. For example, for the generation of CD155 variants, only the IgV domain, and not the other two domains of the ECD, was included in the generated proteins.

[0440] To generate a library targeting specific residues of CD155 by complete or partial randomization with degenerate codons, the coding DNA for the immunoglobulin-like V-type (IgV) domain of human CD155 (SEQ ID NO:241) was ordered from Integrated DNA Technologies (Coralville, Iowa) as a set of overlapping oligonucleotides of up to 80 base pairs (bp) in length. In general, to generate a library of diverse variants of the IgV domain, the oligonucleotides contained desired degenerate codons at desired amino acid positions. Degenerate codons were generated using an algorithm at the URL: rosettadesign.med.unc.edu/SwiftLib/. In general, positions to mutate and degenerate codons were chosen from crystal structure information (PDB: 3UDW) or homology models built from this structure containing the target-ligand pairs of interest to identify ligand contact residues as well as residues that are at the protein interaction interface. For example, a crystal structure of CD155 bound to TIGIT is publicly available at the URL: www.rcsb.org/pdb/explore/explore.do?structureId=3UDW for Protein Data Base code 3UDW. This analysis was performed using a structure viewer available at the URL: spdbv.vital-it.ch).

[0441] The oligonucleotides were used for PCR amplification to generate library DNA inserts for insertion into the modified yeast display version of vector pBYDS03 substantially as described in Example 1. Alternatively, Ultramers (Integrated DNA Technologies) of up to 200 bp in length were used in conjunction with megaprimer PCR (URL: http://www.ncbi.nlm.nih.gov/pmc/articles/PMC146891/pdf/253371.pdf) to generate larger stretches of degenerate codons that could not be as easily incorporated using multiple small overlapping primers. Following the generation of full length product using megaprimer PCR, the mutant IgV domain library was PCR amplified again using DNA primers containing 40 bp overlap region with the modified pBYDS03 cloning variant for homologous recombination into yeast. The library of DNA inserts were prepared for library insertion substantially as descried in Example 1 and electroporation-ready DNA was prepared.

[0442] As alternative approaches, either sublibraries generated by site-directed mutagenesis to target specific residues of the IgV domain of CD155 or random libraries of the IgV domain of CD155 were generated to further identify variants of the IgV domain of CD155 substantially as described in Example 1.

[0443] The degenerate or random library DNA was inserted into yeast substantially as described in Example 2. Yeast expressing affinity modified variants of CD155 were selected using the method substantially described in Example 3. For the selection, the following target ligand proteins were employed: human rTIGIT.Fc (i.e., recombinant TIGIT-Fc fusion protein) and rCD226.Fc. Magnetic Protein A beads were obtained from New England Biolabs, USA. For two-color, flow cytometric sorting, a Bio-Rad S3e sorter was used. CD155 display levels were monitored with an anti-hemagglutinin antibody labeled with Alexafluor 488 (Life Technologies, USA). Ligand binding of Fc fusion proteins, rTIGIT.Fc or rCD226.Fc, were detected with PE conjugated human Ig specific goat Fab (Jackson ImmunoResearch, USA). Doublet yeast were gated out using forward scatter (FSC)/side scatter (SSC) parameters, and sort gates were based upon higher ligand binding detected in FL2 that possessed more limited tag expression binding in FL1.

[0444] Second sort outputs (F2) were obtained substantially as described in Example 3 by expanding and re-inducing expression of sort outputs that had been assayed for higher specific binding affinity and were used to assess binding compared to the parental, wild-type yeast strain. For CD155, the second FACS outputs (F2) were compared to parental CD155 yeast for binding rTIGIT.Fc or rCD226.Fc by double staining each population with anti-HA (hemagglutinin) tag expression and the anti-human Fc secondary to detect ligand binding.

[0445] Selected outputs were reformatted as immunomodulatory proteins containing an affinity modified (variant) immunoglobulin-like V-type (IgV) domain of CD155 fused to an Fc molecule (variant IgV domain-Fc fusion molecules) substantially as described in Example 4, except including only the IgV domain and not the full ECD domain. In some alternative methods for the CD155 outputs, DNA from the outputs were PCR amplified with primers containing 40 bp overlap regions on either end with an Fc fusion vector to carry out in vitro recombination using Gibson Assembly Mastermix (New England Biolabs), which was subsequently used in heat shock transformation into E. Coli strain NEB5alpha. Exemplary of an Fc fusion vector is pFUSE-hIgG1-Fc2 (Invivogen, USA).

[0446] After transformation, samples were prepared for DNA sequencing substantially as described in Example 4. The sequences were then manually curated as described in Example 4, except that they were manually curated so that they start at the beginning of the IgV coding region. The curated sequences were batch-translated and aligned as described in Example 4. Clones of interest were identified using the criteria as described in Example 4. Table 17 sets forth the identified variant CD155 affinity-modified molecules, including the amino acid substitutions contained in each variant.

[0447] The methods generated immunomodulatory proteins containing an affinity-modified IgV domain of CD155 in which the encoding DNA was generated to encode a protein as follows: signal peptide followed by variant (mutant) IgV domain followed by a linker of three alanines (AAA) followed by a human IgG1 Fc containing the mutation N297G (N82G with reference to wild-type human IgG1 Fc set forth in SEQ ID NO: 226). The human IgG1 Fc also contained the mutations R292C and V302C (corresponding to R77C and V87C with reference to wild-type human IgG1 Fc set forth in SEQ ID NO: 226). Since the construct does not include any antibody light chains that can form a covalent bond with a cysteine, the human IgG1 Fc also contained replacement of the cysteine residues to a serine residue at position 5 (C5S) compared to the wild-type or unmodified Fc set forth in SEQ ID NO: 226.

[0448] Recombinant variant CD155 Fc fusion proteins were expressed and purified substantially as described in Example 5. Binding and activity of the affinity-modified variant CD155 Fc fusion proteins was assessed substantially as described in Example 6, except that cells expressing full length human CD226 and TIGIT cognate binding partners were generated. Cells were stained by flow cytometry with CD155 Fc variant and mean fluorescence intensity (MFI) was determined as described in Example 5. For bioactivity characterization, recombinant CD155 Fc variants were assessed in an anti-CD3 coimmobilization assay substantially as described in Example 5.

[0449] The results for the binding and activity studies are set forth in Table 17. The Table indicates exemplary IgSF domain amino acid substitutions (replacements) in the IgV domain of CD155 selected in the screen for affinity-maturation against the respective cognate structures TIGIT and CD226. The exemplary amino acid substitutions are designated by amino acid position number corresponding to position of the unmodified sequence set forth in SEQ ID NO: 241 (IgV). The amino acid position is indicated in the middle, with the corresponding unmodified (e.g. wild-type) amino acid listed before the number and the identified variant amino acid substitution listed after the number. Column 2 sets forth the SEQ ID NO identifier for the variant for each variant ECD-Fc fusion molecule.

[0450] Also shown is the binding activity as measured by the Mean Fluorescence Intensity (MFI) value for binding of each variant Fc-fusion molecule to cells engineered to express the cognate counter structure ligand as the ratio of the MFI compared to the binding of the corresponding unmodified ECD-Fc fusion molecule not containing the amino acid substitution(s) to the same cell-expressed counter structure ligand. The functional activity of the variant Fc-fusion molecules to modulate the activity of T cells also is shown based on the calculated levels of IFN-gamma in culture supernatants (pg/ml) generated with the indicated variant Fc fusion molecule coimmoblized with anti-CD3 as a ratio of IFN-gamma produced by each variant CD155 IgV-Fc compared to the corresponding unmodified CD155 IgV-Fc in both functional assays.

TABLE 17
CD155 variants selected against cognate binding partners. Molecule sequences, binding data,
and costimulatory bioactivity data.

| | | | | | | Anti-CD3 |
|---|---|---|---|---|---|---|
| | | CD226 | | CD96 | Mock | IFN-gamma |
| | | tfxn MFI | TIGIT tfxn | MFI | Expi293 | (pg/ml) |
| | | (CD226 | MFI | (CD96 | MFI | (Anti-CD3 |
| | SEQ | MFI | (TIGIT MFI | MFI | (Mock MFI | IFN-gamma |
| | ID NO | parental | parental | parental | parental | parental |
| CD155 mutations | (IgV) | ratio) | ratio) | ratio) | ratio) | ratio) |
| P18S, P64S, F91S | 264 | 497825 | 247219 | 140065 | 3528 | 270.1 |
| | | (133.7) | (91.1) | (45.4) | (1.2) | (0.7) |
| P18S, F91S, L104P | 265 | 26210 | 75176 | 10867 | 2130 | 364.2 |
| | | (7.0) | (27.7) | (3.5) | (0.7) | (0.9) |
| L44P | 266 | 581289 | 261931 | 152252 | 3414 | 277.6 |
| | | (156.1) | (96.5) | (49.4) | (1.2) | (0.7) |
| A56V | 267 | 455297 | 280265 | 161162 | 2601 | 548.2 |
| | | (122.3) | (103.2) | (52.2) | (0.9) | (1.4) |
| P18L, L79V, F91S | 268 | 5135 | 4073 | 3279 | 2719 | 1241.5 |
| | | (1.4) | (1.5) | (1.1) | (0.9) | (3.2) |
| P18S, F91S | 269 | 408623 | 284190 | 147463 | 3348 | 760.6 |
| | | (109.8) | (104.7) | (47.8) | (1.1) | (2.0) |
| P18T, F91S | 270 | 401283 | 223985 | 157644 | 3065 | 814.7 |
| | | (107.8) | (82.5) | (51.1) | (1.1) | (2.1) |
| P18T, S42P, F91S | 271 | 554105 | 223887 | 135395 | 3796 | 539.7 |
| | | (148.8) | (82.5) | (43.9) | (1.3) | (1.4) |
| G7E, P18T, Y30C, F91S | 272 | 12903 | 12984 | 7906 | 2671 | 275.9 |
| | | (3.5) | (4.8) | (2.6) | (0.9) | (0.7) |
| P18T, F91S, G111D | 273 | 438327 | 287315 | 167583 | 4012 | 307.2 |
| | | (117.7) | (105.8) | (54.3) | (1.4) | (0.8) |
| P18S, F91P | 274 | 4154 | 3220 | 2678 | 2816 | 365.7 |
| | | (1.1) | (1.2) | (0.9) | (1.0) | (0.9) |
| P18T, F91S, F108L | 275 | 394546 | 298680 | 193122 | 2926 | 775.4 |
| | | (106.0) | (110.0) | (62.6) | (1.0) | (2.0) |
| P18T, T45A, F91S | 277 | 435847 | 222044 | 191026 | 2948 | 1546.8 |
| | | (117.1) | (81.8) | (61.9) | (1.0) | (4.0) |
| P18T, F91S, R94H | 278 | 3589 | 2942 | 2509 | 2390 | 1273.2 |
| | | (1.0) | (1.1) | (0.8) | (0.8) | (3.3) |
| P18S, Y30C, F91S | 279 | 382352 | 276358 | 56934 | 3540 | 426.5 |
| | | (102.7) | (101.8) | (18.5) | (1.2) | (1.1) |
| A81V, L83P | 280 | 4169 | 2912 | 2616 | 2993 | 339.7 |
| | | (1.1) | (1.1) | (0.8) | (1.0) | (0.9) |
| L88P | 281 | 65120 | 74845 | 35280 | 2140 | 969.2 |
| | | (17.5) | (27.6) | (11.4) | (0.7) | (2.5) |
| Wild type | 241 | 3723 | 2715 | 3085 | 2913 | 389.6 |
| | | (1.0) | (1.0) | (1.0) | (1.0) | (1.0) |
| R94H | 282 | 18905 | 104013 | 11727 | 1663 | 372.6 |
| | | (5.1) | (38.3) | (3.8) | (0.6) | (1.0) |
| A13E, P18S, A56V, | 283 | 357808 | 179060 | 118570 | 2844 | 349.2 |
| F91S | | (96.1) | (66.0) | (38.4) | (1.0) | (0.9) |
| P18T, F91S, V115A | 284 | 38487 | 46313 | 22718 | 2070 | 1574.5 |
| | | (10.3) | (17.1) | (7.4) | (0.7) | (4.0) |
| P18T, Q60K | 285 | 238266 | 173730 | 154448 | 4778 | 427.2 |
| | | (64.0) | (64.0) | (50.1) | (1.6) | (1.1) |

### Example 10: Generation, Selection and Screening of Affinity-Modified IgSF Domain Variants of CD112

[0451] Affinity-modified IgSF domain variants of CD112 were generated substantially as described in Examples 1-6 above with some slight modifications. For example, for the generation of CD112 variants, only the IgV domain, and not the other two domains of the ECD, was included in the generated proteins.

[0452] To generate a library targeting specific residues of CD155 by complete or partial randomization with degenerate codons, the coding DNA for the immunoglobulin-like V-type (IgV) domain of human CD112 (SEQ ID NO:286) was ordered from Integrated DNA Technologies (Coralville, Iowa) as a set of overlapping oligonucleotides of up to 80 base pairs (bp) in length. In general, to generate a library of diverse variants of the IgV domain, the oligonucleotides contained desired degenerate codons at desired amino acid positions. Degenerate codons were generated using an algorithm at the URL: rosettadesign.med.unc.edu/SwiftLib/. In general, positions to mutate and degenerate codons were chosen from crystal structure information (PDB: 3UDW) or homology models built from this structure containing the target-ligand pairs of interest to identify ligand contact residues as well as residues that are at the protein interaction interface.

[0453] The oligonucleotides were used for PCR amplification to generate library DNA inserts for insertion into the modified yeast display version of vector pBYDS03 substantially as described in Example 1. Alternatively, Ultramers (Integrated DNA Technologies) of up to 200 bp in length were used in conjunction with megaprimer PCR (URL: http://www.ncbi.nlm.nih.gov/pmc/articles/PMC146891/pdf/253371.pdf) to generate larger stretches of degenerate codons that could not be as easily incorporated using multiple small overlapping primers. Following the generation of full length product using megaprimer PCR, the mutant IgV domain library was PCR amplified again using DNA primers containing 40 bp overlap region with the modified pBYDS03 cloning variant for homologous recombination into yeast. The library of DNA inserts were prepared for library insertion substantially as descried in Example 1 and electroporation-ready DNA was prepared.

[0454] As alternative approaches, either sublibraries generated by site-directed mutagenesis to target specific residues of the IgV domain of CD112 or random libraries of the IgV domain of CD112 were generated to further identify variants of the IgV domain of CD112 substantially as described in Example 1.

[0455] The degenerate or random library DNA was inserted into yeast substantially as described in Example 2. Yeast expressing affinity modified variants of CD112 were selected using the method substantially described in Example 3. For the selection, the following target ligand proteins were employed: human rTIGIT.Fc (i.e., recombinant TIGIT-Fc fusion protein), rCD226.Fc and rCD112R.Fc. Magnetic Protein A beads were obtained from New England Biolabs, USA. For two-color, flow cytometric sorting, a Bio-Rad S3e sorter was used. CD112 display levels were monitored with an anti-hemagglutinin antibody labeled with Alexafluor 488 (Life Technologies, USA). Ligand binding of Fc fusion proteins, rTIGIT.Fc, rCD226.Fc, or rCD112R.Fc, were detected with PE conjugated human Ig specific goat Fab (Jackson ImmunoResearch, USA). Doublet yeast were gated out using forward scatter (FSC)/side scatter (SSC) parameters, and sort gates were based upon higher ligand binding detected in FL2 that possessed more limited tag expression binding in FL1.

[0456] Second sort outputs (F2) were obtained substantially as described in Example 3 by expanding and re-inducing expression of sort outputs that had been assayed for higher specific binding affinity and were used to assess binding compared to the parental, wild-type yeast strain. For CD112, the second FACS outputs (F2) were compared to parental CD112 yeast for binding of each rTIGIT.Fc, rCD226.Fc, and rCD112R by double staining each population with anti-HA (hemagglutinin) tag expression and the anti-human Fc secondary to detect ligand binding.

[0457] Selected outputs were reformatted as immunomodulatory proteins containing an affinity modified (variant) immunoglobulin-like V-type (IgV) domain of CD112 fused to an Fc molecule (variant IgV domain-Fc fusion molecules) substantially as described in Example 4, except including only the IgV domain and not the full ECD domain. In some alternative methods for the CD112 outputs, DNA from the outputs were PCR amplified with primers containing 40 bp overlap regions on either end with an Fc fusion vector to carry out in vitro recombination using Gibson Assembly Mastermix (New England Biolabs), which was subsequently used in heat shock transformation into E. Coli strain NEB5alpha. Exemplary of an Fc fusion vector is pFUSE-hIgG1-Fc2 (Invivogen, USA).

[0458] After transformation, samples were prepared for DNA sequencing substantially as described in Example 4. The sequences were then manually curated as described in Example 4, except that they were manually curated so that they start at the beginning of the IgV coding region. The curated sequences were batch-translated and aligned as described in Example 4. Clones of interest were identified using the criteria as described in Example 4. Table 18 sets forth the identified variant CD112 affinity-modified molecules, including the amino acid substitutions contained in each variant.

[0459] The methods generated immunomodulatory proteins containing an affinity-modified IgV domain of CD112 in which the encoding DNA was generated to encode a protein as follows: signal peptide followed by variant (mutant) IgV domain followed by a linker of three alanines (AAA) followed by a human IgG1 Fc containing the mutation N297G (N82G with reference to wild-type human IgG1 Fc set forth in SEQ ID NO: 226). The human IgG1 Fc also contained the mutations R292C and V302C (corresponding to R77C and V87C with reference to wild-type human IgG1 Fc set forth in SEQ ID NO: 226). Since the construct does not include any antibody light chains that can form a covalent bond with a cysteine, the human IgG1 Fc also contained replacement of the cysteine residues to a serine residue at position 5 (C5S) compared to the wild-type or unmodified Fc set forth in SEQ ID NO: 226.

[0460] Recombinant variant CD112 Fc fusion proteins were expressed and purified substantially as described in Example 5. Binding and activity of the affinity-modified variant CD112 Fc fusion proteins was assessed substantially as described in Example 6, except that cells expressing full length human CD226, TIGIT and CD112R cognate binding partners were generated. Cells were stained by flow cytometry with CD112 Fc variant and mean fluorescence intensity (MFI) was determined as described in Example 5. For bioactivity characterization, recombinant CD112 Fc variants were assessed in an anti-CD3 coimmobilization assay substantially as described in Example 5.

[0461] The results for the binding and activity studies are set forth in Table 18. The Table indicates exemplary IgSF domain amino acid substitutions (replacements) in the IgV domain of CD112 selected in the screen for affinity-maturation against the respective cognate structures TIGIT, CD226 and CD112R. The exemplary amino acid substitutions are designated by amino acid position number corresponding to position of the unmodified sequence set forth in SEQ ID NO: 286. The amino acid position is indicated in the middle, with the corresponding unmodified (e.g. wild-type) amino acid listed before the number and the identified variant amino acid substitution listed after the number. Column 2 sets forth the SEQ ID NO identifier for the variant ECD for each variant ECD-Fc fusion molecule.

[0462] Also shown is the binding activity as measured by the Mean Fluorescence Intensity (MFI) value for binding of each variant Fc-fusion molecule to cells engineered to express the cognate counter structure ligand as the ratio of the MFI compared to the binding of the corresponding unmodified ECD-Fc fusion molecule not containing the amino acid substitution(s) to the same cell-expressed counter structure ligand. The functional activity of the variant Fc-fusion molecules to modulate the activity of T cells also is shown based on the calculated levels of IFN-gamma in culture supernatants (pg/ml) generated with the indicated variant Fc fusion molecule coimmoblized with anti-CD3 as a ratio of IFN-gamma produced by each variant CD112 IgV-Fc compared to the corresponding unmodified CD112 IgV-Fc in both functional assays.

TABLE 18
CD112 variants selected against cognate binding partners. Molecule sequences, binding data,
and costimulatory bioactivity data.

| | | | | | | Anti-CD3 |
|---|---|---|---|---|---|---|
| | | TIGIT | CD112R | CD226 | | IFN-gamma |
| | | tfxn MFI | tfxn MFI | MFI | Mock Expi293 | (pg/ml) |
| | | (TIGIT | (CD112R | (CD226 | MFI | (Anti-CD3 |
| | SEQ | MFI | MFI | MFI | (Mock MFI | IFN-gamma |
| | ID NO | parental | parental | parental | parental | parental |
| CD112 mutations | (IgV) | ratio) | ratio) | ratio) | ratio) | ratio) |
| WT CD112 | 286 | 210829 | 1452 | 265392 | 1112 | 676.6 |
| | | (1.00) | (1.00) | (1.00) | (1.00) | (1.00) |
| Y33H, A112V, G117D | 334 | 12948 | 1552 | 1368 | 1241 | 164.8 |
| | | (0.06) | (1.07) | (0.01) | (1.12) | (0.24) |
| V19A, Y33H, S64G, S80G, | 335 | 48356 | 1709 | 2831 | 1098 | |
| G98S, N106Y, A112V | | (0.23) | (1.18) | (0.01) | (0.99) | |
| L32P, A112V | 336 | 191432 | 1557 | 11095 | 1259 | 390.4 |
| | | (0.91) | (1.07) | (0.04) | (1.13) | (0.58) |
| A95V, A112I | 337 | 238418 | 1706 | 51944 | 1215 | 282.5 |
| | | (1.13) | (1.17) | (0.20) | (1.09) | (0.42) |
| P28S, A112V | 338 | 251116 | 1985 | 153382 | 1189 | 503.4 |
| | | (1.19) | (1.37) | (0.58) | (1.07) | (0.74) |
| P27A, T38N, V101A, | 339 | 255803 | 2138 | 222822 | 1399 | 240.7 |
| A112V | | (1.21) | (1.47) | (0.84) | (1.26) | (0.36) |
| S118F | 340 | 11356 | 5857 | 6938 | 1270 | 271.7 |
| | | (0.05) | (4.03) | (0.03) | (1.14) | (0.40) |
| R12W, H48Y, F54S, S118F | 341 | 10940 | 3474 | 5161 | 1069 | |
| | | (0.05) | (2.39) | (0.02) | (0.96) | |
| R12W, Q79R, S118F | 342 | 2339 | 7370 | 1880 | 1338 | 447.4 |
| | | (0.01) | (5.08) | (0.01) | (1.20) | (0.66) |
| T113S, S118Y | 343 | 6212 | 6823 | 1554 | 1214 | 225.1 |
| | | (0.03) | (4.70) | (0.01) | (1.09) | (0.33) |
| S118Y | 344 | 2921 | 6535 | 2003 | 1463 | 190.4 |
| | | (0.01) | (4.50) | (0.01) | (1.32) | (0.28) |
| N106I, S118Y | 345 | 2750 | 7729 | 1815 | 1222 | 265.8 |
| | | (0.01) | (5.32) | (0.01) | (1.10) | (0.39) |
| N106I, S118F | 346 | 1841 | 9944 | 1529 | 1308 | 437.9 |
| | | (0.01) | (6.85) | (0.01) | (1.18) | (0.65) |
| A95T, L96P, S118Y | 347 | 2352 | 4493 | 1412 | 1329 | 292.4 |
| | | (0.01) | (3.09) | (0.01) | (1.19) | (0.43) |
| Y33H, P67S, N106Y, | 348 | 225015 | 3259 | 204434 | 1296 | 618.8 |
| A112V | | (1.07) | (2.24) | (0.77) | (1.17) | (0.91) |
| N106Y, A112V | 349 | 6036 | 1974 | 15334 | 1108 | 409.9 |
| | | (0.03) | (1.36) | (0.06) | (1.00) | (0.61) |
| T18S, Y33H, A112V | 350 | 252647 | 1347 | 183181 | 1412 | 601.8 |
| | | (1.20) | (0.93) | (0.69) | (1.27) | (0.89) |
| P9S, Y33H, N47S, A112V | 351 | 240467 | 1418 | 203608 | 1361 | 449.1 |
| | | (1.14) | (0.98) | (0.77) | (1.22) | (0.66) |
| P42S, P67H, A112V | 352 | 204484 | 1610 | 188647 | 1174 | 530.6 |
| | | (0.97) | (1.11) | (0.71) | (1.06) | (0.78) |
| P27L, L32P, P42S, A112V | 353 | 219883 | 1963 | 84319 | 1900 | 251.6 |
| | | (1.04) | (1.35) | (0.32) | (1.71) | (0.37) |
| G98D, A112V | 354 | 4879 | 2369 | 6100 | 1729 | 387.0 |
| | | (0.02) | (1.63) | (0.02) | (1.55) | (0.57) |
| Y33H, S35P, N106Y, | 355 | 250724 | 1715 | 94373 | 1495 | 516.2 |
| A112V | | (1.19) | (1.18) | (0.36) | (1.34) | (0.76) |
| L32P, P42S, T100A, | 356 | 242675 | 1742 | 202567 | 1748 | 435.3 |
| A112V | | (1.15) | (1.20) | (0.76) | (1.57) | (0.64) |
| P27S, P45S, N106I, A112V | 357 | 223557 | 1799 | 84836 | 1574 | 277.5 |
| | | (1.06) | (1.24) | (0.32) | (1.42) | (0.41) |
| Y33H, N47K, A112V | 358 | 251339 | 1525 | 199601 | 1325 | 483.2 |
| | | (1.19) | (1.05) | (0.75) | (1.19) | (0.71) |
| Y33H, N106Y, A112V | 359 | 297169 | 1782 | 258315 | 1440 | 485.4 |
| | | (1.41) | (1.23) | (0.97) | (1.30) | (0.72) |
| K78R, D84G, A112V, | 360 | 236662 | 1638 | 24850 | 1345 | 142.5 |
| F114S | | (1.12) | (1.13) | (0.09) | (1.21) | (0.21) |
| Y33H, N47K, F54L, A112V | 361 | 14483 | 1617 | 2371 | 1353 | 352.8 |
| | | (0.07) | (1.11) | (0.01) | (1.22) | (0.52) |
| Y33H, A112V | 362 | 98954 | 1216 | 1726 | 1298 | |
| | | (0.47) | (0.84) | (0.01) | (1.17) | |
| A95V, A112V | 363 | 168521 | 2021 | 200789 | 1459 | 412.9 |
| | | (0.80) | (1.39) | (0.76) | (1.31) | (0.61) |
| R12W, A112V | 364 | 135635 | 1582 | 23378 | 1412 | 165.8 |
| | | (0.64) | (1.09) | (0.09) | (1.27) | (0.24) |
| A112V | 370 | 213576 | 1986 | 151900 | 1409 | 211.4 |
| | | (1.01) | (1.37) | (0.57) | (1.27) | (0.31) |
| Y33H, A112V | 362 | 250667 | 1628 | 230578 | 1216 | 612.7 |
| | | (1.19) | (1.12) | (0.87) | (1.09) | (0.91) |
| R12W, P27S, A112V | 365 | 3653 | 1308 | 9105 | 1051 | |
| | | (0.02) | (0.90) | (0.03) | (0.94) | |
| Y33H, V51M, A112V | 366 | 218698 | 1384 | 195450 | 1170 | 709.4 |
| | | (1.04) | (0.95) | (0.74) | (1.05) | (1.05) |
| Y33H, A112V, S118T | 367 | 219384 | 1566 | 192645 | 1313 | 396.3 |
| | | (1.04) | (1.08) | (0.73) | (1.18) | (0.59) |
| Y33H, V101A, A112V, | 368 | 5605 | 1582 | 5079 | 1197 | |
| P115S | | (0.03) | (1.09) | (0.02) | (1.08) | |
| H24R, T38N, D43G, | 369 | 227095 | 1537 | 229311 | 1336 | 858.6 |
| A112V | | (1.08) | (1.06) | (0.86) | (1.20) | (1.27) |
| A112V | 370 | 4056 | 1356 | 10365 | 986 | |
| | | (0.02) | (0.93) | (0.04) | (0.89) | |
| P27A, A112V | 371 | 193537 | 1531 | 230708 | 3084 | 355.1 |
| | | (0.92) | (1.05) | (0.87) | (2.77) | (0.52) |
| A112V, S118T | 372 | 233173 | 1659 | 121817 | 845 | 533.3 |
| | | (1.11) | (1.14) | (0.46) | (0.76) | (0.79) |
| R12W, A112V, M122I | 373 | 235935 | 1463 | 217748 | 1350 | 528.0 |
| | | (1.12) | (1.01) | (0.82) | (1.21) | (0.78) |
| Q83K, N106Y, A112V | 374 | 205948 | 2042 | 234958 | 1551 | 481.4 |
| | | (0.98) | (1.41) | (0.89) | (1.39) | (0.71) |
| R12W, P27S, A112V, | 375 | 11985 | 2667 | 12756 | 1257 | 334.4 |
| S118T | | (0.06) | (1.84) | (0.05) | (1.13) | (0.49) |
| P28S, Y33H, A112V | 376 | 4711 | 1412 | 3968 | 955 | |
| | | (0.02) | (0.97) | (0.01) | (0.86) | |
| P27S, Q90R, A112V | 377 | 3295 | 1338 | 6755 | 1048 | |
| | | (0.02) | (0.92) | (0.03) | (0.94) | |
| L15V, P27A, A112V, | 378 | 209888 | 1489 | 84224 | 1251 | 512.3 |
| S118T | | (1.00) | (1.03) | (0.32) | (1.13) | 0.76) |

### Example 11: Generation and Assessment of Engineered Cells Expressing a Transmembrane Immunomodulatory Protein

[0463] Engineered T cells were generated in which a transmembrane immunomodulatory protein (TIP) containing an extracellular domain (ECD) containing either a variant CD80 or ICOSL affinity-modified IgSF domain as described above was co-expressed with a chimeric antigen receptor (CAR). The TIP also contained a transmembrane domain and a cytoplasmic domain of the corresponding wild-type CD80 or ICOSL transmembrane protein sequence. The immunomodulatory activity of the engineered cells was compared to cells that only expressed the CAR or cells that co-expressed the corresponding wild-type CD80 or ICOSL transmembrane protein with the CAR.

[0464] The exemplary CD80-TIP was a variant CD80 having an affinity-modified IgSF domain containing amino acid mutations in the IgV and IgC domains corresponding to I67T/L70Q/A91G/T120S with reference to positions in the CD80 extracellular domain set forth in SEQ ID NO:28 and a transmembrane and cytoplasmic domain corresponding to residues 243-288 of SEQ ID NO:1. The amino acid sequence of the exemplary CD80-TIP is set forth in SEQ ID NO:381 and is encoded by the sequence of nucleotides set forth in SEQ ID NO:382. The corresponding wild-type CD80 transmembrane protein had the sequence of amino acids set forth as amino acid residues 35-288 of SEQ ID NO:1 and encoded by the sequence of amino acids set forth in SEQ ID NO: 391.

[0465] The exemplary ICOSL-TIP was a variant ICOSL having an affinity-modified IgSF domain containing amino acid mutations in the IgV domain corresponding to N52H/I143T with reference to positions in the ICOSL extracellular domain set forth in SEQ ID NO:32 and a transmembrane and cytoplasmic domain corresponding to residues 257-302 of SEQ ID NO:5. The amino acid sequence of the exemplary ICOSL-TIP is set forth in SEQ ID NO:383 and is encoded by the sequence of nucleotides set forth in SEQ ID NO:384. The corresponding wild-type ICOSL transmembrane protein had the sequence of amino acids set forth as amino acid residues 19-302 of SEQ ID NO:5 and encoded by the sequence of amino acids set forth in SEQ ID NO: 392.

[0466] The TIP containing the affinity-modified domain or the wild-type transmembrane protein containing a corresponding non-affinity modified IgSF domain were co-expressed in T cells with a 1^{st} generation chimeric antigen receptor (CAR) containing a CD3zeta intracellular signaling domain. The 1^{st} generation CAR included an ScFv specific for CD19 (SEQ ID NO:385), a hinge and transmembrane domain derived from CD8 (SEQ ID NO:386) and an intracellular signaling domain derived from CD3zeta (set forth in SEQ ID NO:387). The nucleotide sequence encoding the CD19 scFv—CD3zeta CAR is set forth in SEQ ID NO:388.

[0467] Nucleic acid molecules encoding the CAR alone or also encoding one of the exemplary TIPs or wild-type transmembrane proteins separated from the CAR by a self-cleaving T2A sequence (SEQ ID NO:390 and encoded by the sequence of nucleotides set forth in SEQ ID NO:389) were generated. Exemplary constructs contained nucleic acid sequences set forth in Table 19. As a control, a nucleic acid construct encoding a 2^{nd} generation CAR additionally containing a CD28 costimulatory domain also was generated (CD19 scFv—CD28—CD3zeta).

TABLE 19
Nucleic Acid Constructs

| | CAR | T2A Linker | TIP |
|---|---|---|---|
| | (SEQ ID | (SEQ ID | (SEQ ID |
| | NO) | NO) | NO) |
| CD19 scFv - CD3zeta | + | — | — |
| | (386) | | |
| CD19 scFv - CD3zeta - | + | + | Wildtype CD80 |
| T2A - B7-1 | (386) | (389) | (391) |
| CD19 scFv - CD3zeta - | + | + | CD80 TIP |
| T2A - B7-1_TIP | (386) | (389) | (382) |
| CD19 scFv - CD3zeta - | + | + | Wildtype |
| T2A - ICOSL | (386) | (389) | ICOSL |
| | | | (392) |
| CD19 scFv - CD3zeta - | + | + | ICOSL TIP |
| T2A - ICOSL_TIP | (386) | (389) | (384) |

[0468] The nucleic acid molecules were individually cloned into a lentiviral vector, which was used to transduce T cells isolated from human PBMC samples obtained from three different healthy donors. Lentivirus particles containing the nucleic acid sequences were produced after co-transfection of HEK293 cells with the vectors and lentivirus packaging constructs. The lentivirus particles were collected from the culture medium by ultracentrifugation and titered by qRT-PCR. Human peripheral blood mononuclear cells (PBMC) were isolated from three normal blood donors using density sedimentation. The PBMC were cultured overnight with anti-CD3 and anti-CD28 antibodies and IL-2, then transduced with the lentivirus preparations at a multiplicity of infection of 5:1. The lentiviral vectors encoding the control 2^{nd} generation CAR was only used to transduce cells from one donor.

[0469] After two weeks (14 days) of culture, the cells were analyzed for cytotoxicity following co-culture with target antigen-expressing cells using the Acea Real-Time Cell Analyzer (RTCA), which measures the impedance variations in the culture media of a 96-well microelectronic plate (E-plate), and shows the changes in cell number and morphology in a real-time plot. CD19-expressing HeLa target cells (HeLa-CD19) were seeded into a 96-well E-plate and the impedance of each monolayer was monitored for 24 hours using the RTCA system. The engineered T cells were added to the wells at an effector:target ratio of 10:1 and the wells were monitored for another 48 hours. The results were displayed and recorded as Cell Index (CI) value derived from the change in measured electrical impedance and were then ratio transformed by dividing the CI readouts of all wells at all time points over the CI value of individual wells at a same time (base-time) to obtain a normalized cell index value representing the percentage of the value at the base-time (see Zhang et al. “Introduction to the Data Analysis of the Roche xCELLigence® System with RTCA Package.” Bioconductor. May 3, 2016, bioconductor.org/packages/devel/bioc/vignettes/RTCA/inst/doc/aboutRTCA.pdf. Accessed Sep. 9, 2016). In this assay, a decrease in the impedance of a monolayer reflects killing of the target cells by the transduced cells.

[0470] The results showed that decreased impedance was observed in cells expressing the 1^{st} generation CAR compared to non-transduced T cells, although the degree of decreased impedance for cells expressing the 1^{st} generation CAR was less than cells expressing the 2^{nd} generation CAR. The decreased impedance in cells expressing the 1^{st} generation CAR continued generally for up to the first 8 hours of the assay, while only the 2^{nd} generation CAR-expressing cells continued to decrease the impedance thereafter.

[0471] As shown in FIG. 2, in one donor, each of the cells co-expressing the TIP or corresponding wild-type transmembrane protein with the 1^{st} generation CAR exhibited a greater decrease in impedance, indicating greater cytotoxic activity, compared to cells only expressing the 1^{st} generation CAR. Further, the results showed that the cytotoxic activity was greater in CAR-expressing cells that co-expressed the CD80-TIP or ICOSL-TIP relative to CAR-expressing cells that co-expressed the corresponding wild-type CD80 or ICOSL transmembrane proteins containing a non-affinity modified IgSF domain. The observed results of these TIP-engineered cells showed that cytotoxic activity in cells co-expressing the CD80-TIP or ICOSL-TIP with the CAR exhibit increased activity to modulate the cytotoxic immune response of antigen-specific T cells, such as the CAR-expressing T cells.

[0472] In the other two donors, the cells expressing the CD80-TIP did not result in a greater decreased impedance compared to cells expressing the corresponding wild-type CD80 transmembrane protein. In one donor, there were not enough cells to transduce with the wild-type transmembrane protein construct, although in this donor the ICOS-L TIP gave the best cytotoxicity compared to the other constructs tested. In the other donor, the cells expressing the ICOS-L-TIP did not result in a greater decreased impedance compared to cells expressing the corresponding wild-type ICOS-L transmembrane protein. In the tested cells, all cells co-expressing either a CD80-TIP, ICOSL-TIP or corresponding wild type transmembrane protein with the CAR exhibited greater cytotoxic activity than cells only expressing the 1st generation CAR. The differences in the results observed among donors may be related to the differences in the T cells among the donors, differences in expression levels of the various engineered proteins on the surface of the cells, the particular conditions used in this exemplary assay for assessing killing in cells (e.g. assessing Day 14 transduced cells, assessing a single effector:target cell ratio) or other factors.

[0473] While preferred embodiments of the present invention have been shown and described herein, it will be obvious to those skilled in the art that such embodiments are provided by way of example only. Numerous variations, changes, and substitutions will now occur to those skilled in the art without departing from the invention. It should be understood that various alternatives to the embodiments of the invention described herein may be employed in practicing the invention. It is intended that the following claims define the scope of the invention and that methods and structures within the scope of these claims and their equivalents be covered thereby.

The application's sequence listing, which the Patent Office published only in electronic form, follows.

SEQUENCE LISTING (419 sequences)

SEQ ID NO: 1 - protein, 288 aa, Homo sapiens
  MISC_FEATURE: CD80(B7-1)
MGHTRRQGTSPSKCPYLNFFQLLVLAGLSHFCSGVIHVTKEVKEVATLSCGHNVSVEELAQTRIYWQKEKKMVLTMMSGDMNIWPEYKNRTIFDITNNLSIVILALRPSDEGTYECVVLKYEKDAFKREHLAEVTLSVKADFPTPSISDFEIPTSNIRRIICSTSGGFPEPHLSWLENGEELNAINTTVSQDPETELYAVSSKLDFNMTTNHSFMCLIKYGHLRVNQTFNWNTTKQEHFPDNLLPSWAITLISVNGIFVICCLTYCFAPRCRERRRNERLRRESVRPV

SEQ ID NO: 2 - protein, 329 aa, Homo sapiens
  MISC_FEATURE: CD86(B7-2)
MDPQCTMGLSNILFVMAFLLSGAAPLKIQAYFNETADLPCQFANSQNQSLSELVVFWQDQENLVLNEVYLGKEKFDSVHSKYMGRTSFDSDSWTLRLHNLQIKDKGLYQCIIHHKKPTGMIRIHQMNSELSVLANFSQPEIVPISNITENVYINLTCSSIHGYPEPKKMSVLLRTKNSTIEYDGVMQKSQDNVTELYDVSISLSVSFPDVTSNMTIFCILETDKTRLLSSPFSIELEDPQPPPDHIPWITAVLPTVIICVMVFCLILWKWKKKKRPRNSYKCGTNTMEREESEQTKKREKIHIPERSDEAQRVFKSSKTSSCDKSDTCF

SEQ ID NO: 3 - protein, 290 aa, Homo sapiens
  MISC_FEATURE: CD274 (PD-L1, B7-H1)
MRIFAVFIFMTYWHLLNAFTVTVPKDLYVVEYGSNMTIECKFPVEKQLDLAALIVYWEMEDKNIIQFVHGEEDLKVQHSSYRQRARLLKDQLSLGNAALQITDVKLQDAGVYRCMISYGGADYKRITVKVNAPYNKINQRILVVDPVTSEHELTCQAEGYPKAEVIWTSSDHQVLSGKTTTTNSKREEKLFNVTSTLRINTTTNEIFYCTFRRLDPEENHTAELVIPELPLAHPPNERTHLVILGAILLCLGVALTFIFRLRKGRMMDVKKCGIQDTNSKKQSDTHLEET

SEQ ID NO: 4 - protein, 273 aa, Homo sapiens
  MISC_FEATURE: PDCD1LG2(PD-L2, CD273)
MIFLLLMLSLELQLHQIAALFTVTVPKELYIIEHGSNVTLECNFDTGSHVNLGAITASLQKVENDTSPHRERATLLEEQLPLGKASFHIPQVQVRDEGQYQCIIIYGVAWDYKYLTLKVKASYRKINTHILKVPETDEVELTCQATGYPLAEVSWPNVSVPANTSHSRTPEGLYQVTSVLRLKPPPGRNFSCVFWNTHVRELTLASIDLQSQMEPRTHPTWLLHIFIPFCIIAFIFIATVIALRKQLCQKLYSSKDTTKRPVTTTKREVNSAI

SEQ ID NO: 5 - protein, 302 aa, Homo sapiens
  MISC_FEATURE: ICOSLG(B7RP1, CD275, ICOSL, B7-H2)
MRLGSPGLLFLLFSSLRADTQEKEVRAMVGSDVELSCACPEGSRFDLNDVYVYWQTSESKTVVTYHIPQNSSLENVDSRYRNRALMSPAGMLRGDFSLRLFNVTPQDEQKFHCLVLSQSLGFQEVLSVEVTLHVAANFSVPVVSAPHSPSQDELTFTCTSINGYPRPNVYWINKTDNSLLDQALQNDTVFLNMRGLYDVVSVLRIARTPSVNIGCCIENVLLQQNLTVGSQTGNDIGERDKITENPVSTGEKNAATWSILAVLCLLVVVAVAIGWVCRDRCLQHSYAGAWAVSPETELTGHV

SEQ ID NO: 6 - protein, 534 aa, Homo sapiens
  MISC_FEATURE: CD276(B7-H3)
MLRRRGSPGMGVHVGAALGALWFCLTGALEVQVPEDPVVALVGTDATLCCSFSPEPGFSLAQLNLIWQLTDTKQLVHSFAEGQDQGSAYANRTALFPDLLAQGNASLRLQRVRVADEGSFTCFVSIRDFGSAAVSLQVAAPYSKPSMTLEPNKDLRPGDTVTITCSSYQGYPEAEVFWQDGQGVPLTGNVTTSQMANEQGLFDVHSILRVVLGANGTYSCLVRNPVLQQDAHSSVTITPQRSPTGAVEVQVPEDPVVALVGTDATLRCSFSPEPGFSLAQLNLIWQLTDTKQLVHSFTEGRDQGSAYANRTALFPDLLAQGNASLRLQRVRVADEGSFTCFVSIRDFGSAAVSLQVAAPYSKPSMTLEPNKDLRPGDTVTITCSSYRGYPEAEVFWQDGQGVPLTGNVTTSQMANEQGLFDVHSVLRVVLGANGTYSCLVRNPVLQQDAHGSVTITGQPMTFPPEALWVTVGLSVCLIALLVALAFVCWRKIKQSCEEENAGAEDQDGEGEGSKTALQPLKHSDSKEDDGQEIA

SEQ ID NO: 7 - protein, 282 aa, Homo sapiens
  MISC_FEATURE: VTCN1(B7-H4)
MASLGQILFWSIISIIIILAGAIALIIGFGISGRHSITVTTVASAGNIGEDGILSCTFEPDIKLSDIVIQWLKEGVLGLVHEFKEGKDELSEQDEMFRGRTAVFADQVIVGNASLRLKNVQLTDAGTYKCYIITSKGKGNANLEYKTGAFSMPEVNVDYNASSETLRCEAPRWFPQPTVVWASQVDQGANFSEVSNTSFELNSENVTMKVVSVLYNVTINNTYSCMIENDIAKATGDIKVTESEIKRRSHLQLLNSKASLCVSSFFAISWALLPLSPYLMLK

SEQ ID NO: 8 - protein, 220 aa, Homo sapiens
  MISC_FEATURE: CD28
MLRLLLALNLFPSIQVTGNKILVKQSPMLVAYDNAVNLSCKYSYNLFSREFRASLHKGLDSAVEVCVVYGNYSQQLQVYSKTGFNCDGKLGNESVTFYLQNLYVNQTDIYFCKIEVMYPPPYLDNEKSNGTIIHVKGKHLCPSPLFPGPSKPFWVLVVVGGVLACYSLLVTVAFIIFWVRSKRSRLLHSDYMNMTPRRPGPTRKHYQPYAPPRDFAAYRS

SEQ ID NO: 9 - protein, 223 aa, Homo sapiens
  MISC_FEATURE: CTLA4
MACLGFQRHKAQLNLATRTWPCTLLFFLLFIPVFCKAMHVAQPAVVLASSRGIASFVCEYASPGKATEVRVTVLRQADSQVTEVCAATYMMGNELTFLDDSICTGTSSGNQVNLTIQGLRAMDTGLYICKVELMYPPPYYLGIGNGTQIYVIDPEPCPDSDFLLWILAAVSSGLFFYSFLLTAVSLSKMLKKRSPLTTGVYVKMPPTEPECEKQFQPYFIPIN

SEQ ID NO: 10 - protein, 288 aa, Homo sapiens
  MISC_FEATURE: PDCD1(PD-1)
MQIPQAPWPVVWAVLQLGWRPGWFLDSPDRPWNPPTFSPALLVVTEGDNATFTCSFSNTSESFVLNWYRMSPSNQTDKLAAFPEDRSQPGQDCRFRVTQLPNGRDFHMSVVRARRNDSGTYLCGAISLAPKAQIKESLRAELRVTERRAEVPTAHPSPSPRPAGQFQTLVVGVVGGLLGSLVLLVWVLAVICSRAARGTIGARRTGQPLKEDPSAVPVFSVDYGELDFQWREKTPEPPVPCVPEQTEYATIVFPSGMGTSSPARRGSADGPRSAQPLRPEDGHCSWPL

SEQ ID NO: 11 - protein, 199 aa, Homo sapiens
  MISC_FEATURE: ICOS
MKSGLWYFFLFCLRIKVLTGEINGSANYEMFIFHNGGVQILCKYPDIVQQFKMQLLKGGQILCDLTKTKGSGNTVSIKSLKFCHSQLSNNSVSFFLYNLDHSHANYYFCNLSIFDPPPFKVTLTGGYLHIYESQLCCQLKFWLPIGCAAFVVVCILGCILICWLTKKKYSSSVHDPNGEYMFMRAVNTAKKSRLTDVTL

SEQ ID NO: 12 - protein, 289 aa, Homo sapiens
  MISC_FEATURE: BTLA(CD272)
MKTLPAMLGTGKLFWVFFLIPYLDIWNIHGKESCDVQLYIKRQSEHSILAGDPFELECPVKYCANRPHVTWCKLNGTTCVKLEDRQTSWKEEKNISFFILHFEPVLPNDNGSYRCSANFQSNLIESHSTTLYVTDVKSASERPSKDEMASRPWLLYRLLPLGGLPLLITTCFCLFCCLRRHQGKQNELSDTAGREINLVDAHLKSEQTEASTRQNSQVLLSETGIYDNDPDLCFRMQEGSEVYSNPCLEENKPGIVYASLNHSVIGPNSRLARNVKEAPTEYASICVRS

SEQ ID NO: 13 - protein, 458 aa, Homo sapiens
  MISC_FEATURE: CD4
MNRGVPFRHLLLVLQLALLPAATQGKKVVLGKKGDTVELTCTASQKKSIQFHWKNSNQIKILGNQGSFLTKGPSKLNDRADSRRSLWDQGNFPLIIKNLKIEDSDTYICEVEDQKEEVQLLVFGLTANSDTHLLQGQSLTLTLESPPGSSPSVQCRSPRGKNIQGGKTLSVSQLELQDSGTWTCTVLQNQKKVEFKIDIVVLAFQKASSIVYKKEGEQVEFSFPLAFTVEKLTGSGELWWQAERASSSKSWITFDLKNKEVSVKRVTQDPKLQMGKKLPLHLTLPQALPQYAGSGNLTLALEAKTGKLHQEVNLVVMRATQLQKNLTCEVWGPTSPKLMLSLKLENKEAKVSKREKAVWVLNPEAGMWQCLLSDSGQVLLESNIKVLPTWSTPVQPMALIVLGGVAGLLLFIGLGIFFCVRCRHRRRQAERMSQIKRLLSEKKTCQCPHRFQKTCSPI

SEQ ID NO: 14 - protein, 235 aa, Homo sapiens
  MISC_FEATURE: CD8A(CD8-alpha)
MALPVTALLLPLALLLHAARPSQFRVSPLDRTWNLGETVELKCQVLLSNPTSGCSWLFQPRGAAASPTFLLYLSQNKPKAAEGLDTQRFSGKRLGDTFVLTLSDFRRENEGYYFCSALSNSIMYFSHFVPVFLPAKPTTTPAPRPPTPAPTIASQPLSLRPEACRPAAGGAVHTRGLDFACDIYIWAPLAGTCGVLLLSLVITLYCNHRNRRRVCKCPRPVVKSGDKPSLSARYV

SEQ ID NO: 15 - protein, 210 aa, Homo sapiens
  MISC_FEATURE: CD8B(CD8-beta)
MRPRLWLLLAAQLTVLHGNSVLQQTPAYIKVQTNKMVMLSCEAKISLSNMRIYWLRQRQAPSSDSHHEFLALWDSAKGTIHGEEVEQEKIAVFRDASRFILNLTSVKPEDSGIYFCMIVGSPELTFGKGTQLSVVDFLPTTAQPTKKSTLKKRVCRLPRPETQKGPLCSPITLGLLVAGVLVLLVSLGVAIHLCCRRRRARLRFMKQFYK

SEQ ID NO: 16 - protein, 525 aa, Homo sapiens
  MISC_FEATURE: LAG3
MWEAQFLGLLFLQPLWVAPVKPLQPGAEVPVVWAQEGAPAQLPCSPTIPLQDLSLLRRAGVTWQHQPDSGPPAAAPGHPLAPGPHPAAPSSWGPRPRRYTVLSVGPGGLRSGRLPLQPRVQLDERGRQRGDFSLWLRPARRADAGEYRAAVHLRDRALSCRLRLRLGQASMTASPPGSLRASDWVILNCSFSRPDRPASVHWFRNRGQGRVPVRESPHHHLAESFLFLPQVSPMDSGPWGCILTYRDGFNVSIMYNLTVLGLEPPTPLTVYAGAGSRVGLPCRLPAGVGTRSFLTAKWTPPGGGPDLLVTGDNGDFTLRLEDVSQAQAGTYTCHIHLQEQQLNATVTLAIITVTPKSFGSPGSLGKLLCEVTPVSGQERFVWSSLDTPSQRSFSGPWLEAQEAQLLSQPWQCQLYQGERLLGAAVYFTELSSPGAQRSGRAPGALPAGHLLLFLILGVLSLLLLVTGAFGFHLWRRQWRPRRFSALEQGIHPPQAQSKIEELEQEPEPEPEPEPEPEPEPEPEQL

SEQ ID NO: 17 - protein, 301 aa, Homo sapiens
  MISC_FEATURE: HAVCR2(TIM-3)
MFSHLPFDCVLLLLLLLLTRSSEVEYRAEVGQNAYLPCFYTPAAPGNLVPVCWGKGACPVFECGNVVLRTDERDVNYWTSRYWLNGDFRKGDVSLTIENVTLADSGIYCCRIQIPGIMNDEKFNLKLVIKPAKVTPAPTRQRDFTAAFPRMLTTRGHGPAETQTLGSLPDINLTQISTLANELRDSRLANDLRDSGATIRIGIYIGAGICAGLALALIFGALIFKWYSHSKEKIQNLSLISLANLPPSGLANAVAEGIRSEENIYTIEENVYEVEEPNEYYCYVSSRQQPSQPLGCRFAMP

SEQ ID NO: 18 - protein, 526 aa, Homo sapiens
  MISC_FEATURE: CEACAM1
MGHLSAPLHRVRVPWQGLLLTASLLTFWNPPTTAQLTTESMPFNVAEGKEVLLLVHNLPQQLFGYSWYKGERVDGNRQIVGYAIGTQQATPGPANSGRETIYPNASLLIQNVTQNDTGFYTLQVIKSDLVNEEATGQFHVYPELPKPSISSNNSNPVEDKDAVAFTCEPETQDTTYLWWINNQSLPVSPRLQLSNGNRTLTLLSVTRNDTGPYECEIQNPVSANRSDPVTLNVTYGPDTPTISPSDTYYRPGANLSLSCYAASNPPAQYSWLINGTFQQSTQELFIPNITVNNSGSYTCHANNSVTGCNRTTVKTIIVTELSPVVAKPQIKASKTTVTGDKDSVNLTCSTNDTGISIRWFFKNQSLPSSERMKLSQGNTTLSINPVKREDAGTYWCEVFNPISKNQSDPIMLNVNYNALPQENGLSPGAIAGIVIGVVALVALIAVALACFLHFGKTGRASDQRDLTEHKPSVSNHTQDHSNDPPNKMNEVTYSTLNFEAQQPTQPTSASPSLTATEIIYSEVKKQ

SEQ ID NO: 19 - protein, 244 aa, Homo sapiens
  MISC_FEATURE: TIGIT
MRWCLLLIWAQGLRQAPLASGMMTGTIETTGNISAEKGGSIILQCHLSSTTAQVTQVNWEQQDQLLAICNADLGWHISPSFKDRVAPGPGLGLTLQSLTVNDTGEYFCIYHTYPDGTYTGRIFLEVLESSVAEHGARFQIPLLGAMAATLVVICTAVIVVVALTRKKKALRIHSVEGDLRRKSAGQEEWSPSAPSPPGSCVQAEAAPAGLCGEQRGEDCAELHDYFNVLSYRSLGNCSFFTETG

SEQ ID NO: 20 - protein, 417 aa, Homo sapiens
  MISC_FEATURE: PVR(CD155)
MARAMAAAWPLLLVALLVLSWPPPGTGDVVVQAPTQVPGFLGDSVTLPCYLQVPNMEVTHVSQLTWARHGESGSMAVFHQTQGPSYSESKRLEFVAARLGAELRNASLRMFGLRVEDEGNYTCLFVTFPQGSRSVDIWLRVLAKPQNTAEVQKVQLTGEPVPMARCVSTGGRPPAQITWHSDLGGMPNTSQVPGFLSGTVTVTSLWILVPSSQVDGKNVTCKVEHESFEKPQLLTVNLTVYYPPEVSISGYDNNWYLGQNEATLTCDARSNPEPTGYNWSTTMGPLPPFAVAQGAQLLIRPVDKPINTTLICNVTNALGARQAELTVQVKEGPPSEHSGISRNAIIFLVLGILVFLILLGIGIYFYWSKCSREVLWHCHLCPSSTEHASASANGHVSYSAVSRENSSSQDPQTEGTR

SEQ ID NO: 21 - protein, 538 aa, Homo sapiens
  MISC_FEATURE: PVRL2(CD112)
MARAAALLPSRSPPTPLLWPLLLLLLLETGAQDVRVQVLPEVRGQLGGTVELPCHLLPPVPGLYISLVTWQRPDAPANHQNVAAFHPKMGPSFPSPKPGSERLSFVSAKQSTGQDTEAELQDATLALHGLTVEDEGNYTCEFATFPKGSVRGMTWLRVIAKPKNQAEAQKVTFSQDPTTVALCISKEGRPPARISWLSSLDWEAKETQVSGTLAGTVTVTSRFTLVPSGRADGVTVTCKVEHESFEEPALIPVTLSVRYPPEVSISGYDDNWYLGRTDATLSCDVRSNPEPTGYDWSTTSGTFPTSAVAQGSQLVIHAVDSLFNTTFVCTVTNAVGMGRAEQVIFVRETPNTAGAGATGGIIGGIIAAIIATAVAATGILICRQQRKEQTLQGAEEDEDLEGPPSYKPPTPKAKLEAQEMPSQLFTLGASEHSPLKTPYFDAGASCTEQEMPRYHELPTLEERSGPLHPGATSLGSPIPVPPGPPAVEDVSLDLEDEEGEEEEEYLDKINPIYDALSYSSPSDSYQGKGFVMSRAMYV

SEQ ID NO: 22 - protein, 336 aa, Homo sapiens
  MISC_FEATURE: CD226
MDYPTLLLALLHVYRALCEEVLWHTSVPFAENMSLECVYPSMGILTQVEWFKIGTQQDSIAIFSPTHGMVIRKPYAERVYFLNSTMASNNMTLFFRNASEDDVGYYSCSLYTYPQGTWQKVIQVVQSDSFEAAVPSNSHIVSEPGKNVTLTCQPQMTWPVQAVRWEKIQPRQIDLLTYCNLVHGRNFTSKFPRQIVSNCSHGRWSVIVIPDVTVSDSGLYRCYLQASAGENETFVMRLTVAEGKTDNQYTLFVAGGTVLLLLFVISITTIIVIFLNRRRRRERRDLFTESWDTQKAPNNYRSPISTSQPTNQSMDDTREDIYVNYPTFSRRPKTRV

SEQ ID NO: 23 - protein, 351 aa, Homo sapiens
  MISC_FEATURE: CD2
MSFPCKFVASFLLIFNVSSKGAVSKEITNALETWGALGQDINLDIPSFQMSDDIDDIKWEKTSDKKKIAQFRKEKETFKEKDTYKLFKNGTLKIKHLKTDDQDIYKVSIYDTKGKNVLEKIFDLKIQERVSKPKISWTCINTTLTCEVMNGTDPELNLYQDGKHLKLSQRVITHKWTTSLSAKFKCTAGNKVSKESSVEPVSCPEKGLDIYLIIGICGGGSLLMVFVALLVFYITKRKKQRSRRNDEELETRAHRVATEERGRKPHQIPASTPQNPATSQHPPPPPGHRSQAPSHRPPPPGHRVQHQPQKRPPAPSGTQVHQQKGPPLPRPRVQPKPPHGAAENSLSPSSN

SEQ ID NO: 24 - protein, 180 aa, Homo sapiens
  MISC_FEATURE: CD160
MLLEPGRGCCALAILLAIVDIQSGGCINITSSASQEGTRLNLICTVWHKKEEAEGFVVFLCKDRSGDCSPETSLKQLRLKRDPGIDGVGEISSQLMFTISQVTPLHSGTYQCCARSQKSGIRLQGHFFSILFTETGNYTVTGLKQRQHLEFSHNEGTLSSGFLQEKVWVMLVTSLVALQA

SEQ ID NO: 25 - protein, 278 aa, Homo sapiens
  MISC_FEATURE: CD200
MERLVIRMPFSHLSTYSLVWVMAAVVLCTAQVQVVTQDEREQLYTPASLKCSLQNAQEALIVTWQKKKAVSPENMVTFSENHGVVIQPAYKDKINITQLGLQNSTITFWNITLEDEGCYMCLFNTFGFGKISGTACLTVYVQPIVSLHYKFSEDHLNITCSATARPAPMVFWKVPRSGIENSTVTLSHPNGTTSVTSILHIKDPKNQVGKEVICQVLHLGTVTDFKQTVNKGYWFSVPLLLSIVSLVILLVLISILLYWKRHRNQDRGELSQGVQKMT

SEQ ID NO: 26 - protein, 325 aa, Homo sapiens [sequence omitted]

SEQ ID NO: 27 - protein, 201 aa, Homo sapiens
  MISC_FEATURE: NC R3 (NKp30)
MAWMLLLILIMVHPGSCALWVSQPPEIRTLEGSSAFLPCSFNASQGRLAIGSVTWFRDEVVPGKEVRNGTPEFRGRLAPLASSRFLHDHQAELHIRDVRGHDASIYVCRVEVLGLGVGTGNGTRLVVEKEHPQLGAGTVLLLRAGFYAVSFLSVAVGSTVYYQGKCLTWKGPRRQLPAVVPAPLPPPCGSSAHLLPPVPGG

SEQ ID NO: 28 - protein, 208 aa, Homo sapiens [sequence omitted]

SEQ ID NO: 29 - protein, 224 aa, Homo sapiens
  MISC_FEATURE: CD86(B7-2) ECD
APLKIQAYFNETADLPCQFANSQNQSLSELVVFWQDQENLVLNEVYLGKEKFDSVHSKYMGRTSFDSDSWTLRLHNLQIKDKGLYQCIIHHKKPTGMIRIHQMNSELSVLANFSQPEIVPISNITENVYINLTCSSIHGYPEPKKMSVLLRTKNSTIEYDGVMQKSQDNVTELYDVSISLSVSFPDVTSNMTIFCILETDKTRLLSSPFSIELEDPQPPPDHIP

SEQ ID NO: 30 - protein, 220 aa, Homo sapiens
  MISC_FEATURE: CD274 (PD-L1, B7-H1) ECD
FTVTVPKDLYVVEYGSNMTIECKFPVEKQLDLAALIVYWEMEDKNIIQFVHGEEDLKVQHSSYRQRARLLKDQLSLGNAALQITDVKLQDAGVYRCMISYGGADYKRITVKVNAPYNKINQRILVVDPVTSEHELTCQAEGYPKAEVIWTSSDHQVLSGKTTTTNSKREEKLFNVTSTLRINTTTNEIFYCTFRRLDPEENHTAELVIPELPLAHPPNER

SEQ ID NO: 31 - protein, 201 aa, Homo sapiens
  MISC_FEATURE: PDCD1LG2(PD-L2, CD273) ECD
LFTVTVPKELYIIEHGSNVTLECNFDTGSHVNLGAITASLQKVENDTSPHRERATLLEEQLPLGKASFHIPQVQVRDEGQYQCIIIYGVAWDYKYLTLKVKASYRKINTHILKVPETDEVELTCQATGYPLAEVSWPNVSVPANTSHSRTPEGLYQVTSVLRLKPPPGRNFSCVFWNTHVRELTLASIDLQSQMEPRTHPT

SEQ ID NO: 32 - protein, 238 aa, Homo sapiens [sequence omitted]

SEQ ID NO: 33 - protein, 438 aa, Homo sapiens
  MISC_FEATURE: CD276(B7-H3) ECD
LEVQVPEDPVVALVGTDATLCCSFSPEPGFSLAQLNLIWQLTDTKQLVHSFAEGQDQGSAYANRTALFPDLLAQGNASLRLQRVRVADEGSFTCFVSIRDFGSAAVSLQVAAPYSKPSMTLEPNKDLRPGDTVTITCSSYQGYPEAEVFWQDGQGVPLTGNVTTSQMANEQGLFDVHSILRVVLGANGTYSCLVRNPVLQQDAHSSVTITPQRSPTGAVEVQVPEDPVVALVGTDATLRCSFSPEPGFSLAQLNLIWQLTDTKQLVHSFTEGRDQGSAYANRTALFPDLLAQGNASLRLQRVRVADEGSFTCFVSIRDFGSAAVSLQVAAPYSKPSMTLEPNKDLRPGDTVTITCSSYRGYPEAEVFWQDGQGVPLTGNVTTSQMANEQGLFDVHSVLRVVLGANGTYSCLVRNPVLQQDAHGSVTITGQPMTFPPEA

SEQ ID NO: 34 - protein, 235 aa, Homo sapiens
  MISC_FEATURE: VTCN1(B7-H4) ECD
LIIGFGISGRHSITVTTVASAGNIGEDGILSCTFEPDIKLSDIVIQWLKEGVLGLVHEFKEGKDELSEQDEMFRGRTAVFADQVIVGNASLRLKNVQLTDAGTYKCYIITSKGKGNANLEYKTGAFSMPEVNVDYNASSETLRCEAPRWFPQPTVVWASQVDQGANFSEVSNTSFELNSENVTMKVVSVLYNVTINNTYSCMIENDIAKATGDIKVTESEIKRRSHLQLLNSKAS

SEQ ID NO: 35 - protein, 134 aa, Homo sapiens
  MISC_FEATURE: CD28 ECD
NKILVKQSPMLVAYDNAVNLSCKYSYNLFSREFRASLHKGLDSAVEVCVVYGNYSQQLQVYSKTGFNCDGKLGNESVTFYLQNLYVNQTDIYFCKIEVMYPPPYLDNEKSNGTIIHVKGKHLCPSPLFPGPSKP

SEQ ID NO: 36 - protein, 126 aa, Homo sapiens [sequence omitted]

SEQ ID NO: 37 - protein, 150 aa, Homo sapiens [sequence omitted]

SEQ ID NO: 38 - protein, 120 aa, Homo sapiens
  MISC_FEATURE: ICOS ECD
EINGSANYEMFIFHNGGVQILCKYPDIVQQFKMQLLKGGQILCDLTKTKGSGNTVSIKSLKFCHSQLSNNSVSFFLYNLDHSHANYYFCNLSIFDPPPFKVTLTGGYLHIYESQLCCQLK

SEQ ID NO: 39 - protein, 127 aa, Homo sapiens
  MISC_FEATURE: BTLA(CD272) ECD
KESCDVQLYIKRQSEHSILAGDPFELECPVKYCANRPHVTWCKLNGTTCVKLEDRQTSWKEEKNISFFILHFEPVLPNDNGSYRCSANFQSNLIESHSTTLYVTDVKSASERPSKDEMASRPWLLYR

SEQ ID NO: 40 - protein, 371 aa, Homo sapiens
  MISC_FEATURE: CD4 ECD
KKVVLGKKGDTVELTCTASQKKSIQFHWKNSNQIKILGNQGSFLTKGPSKLNDRADSRRSLWDQGNFPLIIKNLKIEDSDTYICEVEDQKEEVQLLVFGLTANSDTHLLQGQSLTLTLESPPGSSPSVQCRSPRGKNIQGGKTLSVSQLELQDSGTWTCTVLQNQKKVEFKIDIVVLAFQKASSIVYKKEGEQVEFSFPLAFTVEKLTGSGELWWQAERASSSKSWITFDLKNKEVSVKRVTQDPKLQMGKKLPLHLTLPQALPQYAGSGNLTLALEAKTGKLHQEVNLVVMRATQLQKNLTCEVWGPTSPKLMLSLKLENKEAKVSKREKAVWVLNPEAGMWQCLLSDSGQVLLESNIKVLPTWSTPVQP

SEQ ID NO: 41 - protein, 161 aa, Homo sapiens
  MISC_FEATURE: CD8A(CD8-alpha) ECD
SQFRVSPLDRTWNLGETVELKCQVLLSNPTSGCSWLFQPRGAAASPTFLLYLSQNKPKAAEGLDTQRFSGKRLGDTFVLTLSDFRRENEGYYFCSALSNSIMYFSHFVPVFLPAKPTTTPAPRPPTPAPTIASQPLSLRPEACRPAAGGAVHTRGLDFACD

SEQ ID NO: 42 - protein, 149 aa, Homo sapiens
  MISC_FEATURE: CD8B(CD8-beta) ECD
LQQTPAYIKVQTNKMVMLSCEAKISLSNMRIYWLRQRQAPSSDSHHEFLALWDSAKGTIHGEEVEQEKIAVFRDASRFILNLTSVKPEDSGIYFCMIVGSPELTFGKGTQLSVVDFLPTTAQPTKKSTLKKRVCRLPRPETQKGPLCSP

SEQ ID NO: 43 - protein, 422 aa, Homo sapiens
  MISC_FEATURE: LAG3 ECD
VPVVWAQEGAPAQLPCSPTIPLQDLSLLRRAGVTWQHQPDSGPPAAAPGHPLAPGPHPAAPSSWGPRPRRYTVLSVGPGGLRSGRLPLQPRVQLDERGRQRGDFSLWLRPARRADAGEYRAAVHLRDRALSCRLRLRLGQASMTASPPGSLRASDWVILNCSFSRPDRPASVHWFRNRGQGRVPVRESPHHHLAESFLFLPQVSPMDSGPWGCILTYRDGFNVSIMYNLTVLGLEPPTPLTVYAGAGSRVGLPCRLPAGVGTRSFLTAKWTPPGGGPDLLVTGDNGDFTLRLEDVSQAQAGTYTCHIHLQEQQLNATVTLAIITVTPKSFGSPGSLGKLLCEVTPVSGQERFVWSSLDTPSQRSFSGPWLEAQEAQLLSQPWQCQLYQGERLLGAAVYFTELSSPGAQRSGRAPGALPAGHL

SEQ ID NO: 44 - protein, 181 aa, Homo sapiens
  MISC_FEATURE: HAVCR2(TIM-3) ECD
SEVEYRAEVGQNAYLPCFYTPAAPGNLVPVCWGKGACPVFECGNVVLRTDERDVNYWTSRYWLNGDFRKGDVSLTIENVTLADSGIYCCRIQIPGIMNDEKFNLKLVIKPAKVTPAPTRQRDFTAAFPRMLTTRGHGPAETQTLGSLPDINLTQISTLANELRDSRLANDLRDSGATIRIG

SEQ ID NO: 45 - protein, 394 aa, Homo sapiens
  MISC_FEATURE: CEACAM1 ECD
QLTTESMPFNVAEGKEVLLLVHNLPQQLFGYSWYKGERVDGNRQIVGYAIGTQQATPGPANSGRETIYPNASLLIQNVTQNDTGFYTLQVIKSDLVNEEATGQFHVYPELPKPSISSNNSNPVEDKDAVAFTCEPETQDTTYLWWINNQSLPVSPRLQLSNGNRTLTLLSVTRNDTGPYECEIQNPVSANRSDPVTLNVTYGPDTPTISPSDTYYRPGANLSLSCYAASNPPAQYSWLINGTFQQSTQELFIPNITVNNSGSYTCHANNSVTGCNRTTVKTIIVTELSPVVAKPQIKASKTTVTGDKDSVNLTCSTNDTGISIRWFFKNQSLPSSERMKLSQGNTTLSINPVKREDAGTYWCEVFNPISKNQSDPIMLNVNYNALPQENGLSPG

SEQ ID NO: 46 - protein, 120 aa, Homo sapiens
  MISC_FEATURE: TIGIT ECD
MMTGTIETTGNISAEKGGSIILQCHLSSTTAQVTQVNWEQQDQLLAICNADLGWHISPSFKDRVAPGPGLGLTLQSLTVNDTGEYFCIYHTYPDGTYTGRIFLEVLESSVAEHGARFQIP

SEQ ID NO: 47 - protein, 323 aa, Homo sapiens
  MISC_FEATURE: PVR(CD155) ECD
WPPPGTGDVVVQAPTQVPGFLGDSVTLPCYLQVPNMEVTHVSQLTWARHGESGSMAVFHQTQGPSYSESKRLEFVAARLGAELRNASLRMFGLRVEDEGNYTCLFVTFPQGSRSVDIWLRVLAKPQNTAEVQKVQLTGEPVPMARCVSTGGRPPAQITWHSDLGGMPNTSQVPGFLSGTVTVTSLWILVPSSQVDGKNVTCKVEHESFEKPQLLTVNLTVYYPPEVSISGYDNNWYLGQNEATLTCDARSNPEPTGYNWSTTMGPLPPFAVAQGAQLLIRPVDKPINTTLICNVTNALGARQAELTVQVKEGPPSEHSGISRN

SEQ ID NO: 48 - protein, 329 aa, Homo sapiens
  MISC_FEATURE: PVRL2(CD112) ECD
QDVRVQVLPEVRGQLGGTVELPCHLLPPVPGLYISLVTWQRPDAPANHQNVAAFHPKMGPSFPSPKPGSERLSFVSAKQSTGQDTEAELQDATLALHGLTVEDEGNYTCEFATFPKGSVRGMTWLRVIAKPKNQAEAQKVTFSQDPTTVALCISKEGRPPARISWLSSLDWEAKETQVSGTLAGTVTVTSRFTLVPSGRADGVTVTCKVEHESFEEPALIPVTLSVRYPPEVSISGYDDNWYLGRTDATLSCDVRSNPEPTGYDWSTTSGTFPTSAVAQGSQLVIHAVDSLFNTTFVCTVTNAVGMGRAEQVIFVRETPNTAGAGATGG

SEQ ID NO: 49 - protein, 236 aa, Homo sapiens [sequence omitted]

SEQ ID NO: 50 - protein, 185 aa, Homo sapiens
  MISC_FEATURE: CD2 ECD
KEITNALETWGALGQDINLDIPSFQMSDDIDDIKWEKTSDKKKIAQFRKEKETFKEKDTYKLFKNGTLKIKHLKTDDQDIYKVSIYDTKGKNVLEKIFDLKIQERVSKPKISWTCINTTLTCEVMNGTDPELNLYQDGKHLKLSQRVITHKWTTSLSAKFKCTAGNKVSKESSVEPVSCPEKGLD

SEQ ID NO: 51 - protein, 133 aa, Homo sapiens
  MISC_FEATURE: CD160 ECD
INITSSASQEGTRLNLICTVWHKKEEAEGFVVFLCKDRSGDCSPETSLKQLRLKRDPGIDGVGEISSQLMFTISQVTPLHSGTYQCCARSQKSGIRLQGHFFSILFTETGNYTVTGLKQRQHLEFSHNEGTLS

SEQ ID NO: 52 - protein, 202 aa, Homo sapiens
  MISC_FEATURE: CD200 ECD
QVQVVTQDEREQLYTPASLKCSLQNAQEALIVTWQKKKAVSPENMVTFSENHGVVIQPAYKDKINITQLGLQNSTITFWNITLEDEGCYMCLFNTFGFGKISGTACLTVYVQPIVSLHYKFSEDHLNITCSATARPAPMVFWKVPRSGIENSTVTLSHPNGTTSVTSILHIKDPKNQVGKEVICQVLHLGTVTDFKQTVNKG

SEQ ID NO: 53 - protein, 215 aa, Homo sapiens
  MISC_FEATURE: CD200R1(CD200R) ECD
MDEKQITQNYSKVLAEVNTSWPVKMATNAVLCCPPIALRNLIIITWEIILRGQPSCTKAYRKETNETKETNCTDERITWVSRPDQNSDLQIRPVAITHDGYYRCIMVTPDGNFHRGYHLQVLVTPEVTLFQNRNRTAVCKAVAGKPAAQISWIPEGDCATKQEYWSNGTVTVKSTCHWEVHNVSTVTCHVSHLTGNKSLYIELLPVPGAKKSAKL

SEQ ID NO: 54 - protein, 117 aa, Homo sapiens
  MISC_FEATURE: NC R3 (NKp30) ECD
LWVSQPPEIRTLEGSSAFLPCSFNASQGRLAIGSVTWFRDEVVPGKEVRNGTPEFRGRLAPLASSRFLHDHQAELHIRDVRGHDASIYVCRVEVLGLGVGTGNGTRLVVEKEHPQLG

SEQ ID NO: 55 - protein, 208 aa, Artificial Sequence
  CD80 v1 ECD
VIHVTKEVKEVATLSCGHNVSVEELAQTRIYWQKEKKMVLTMMSGDMNIWPEYKNRTIFDITNNLSIVIQALRPSDEGTYECVVLKYEKDGFKREHLAEVTLSVKADFPTPSISDFEIPTSNIRRIICSTSGGFPEPHLSWLENGEELNAINTTVSQDPETELYAVSSKLDFNMTTNHSFMCLIKYGHLRVNQTFNWNTTKQEHFPDN

SEQ ID NO: 56 - protein, 208 aa, Artificial Sequence
  CD80 v2 ECD
VIHVTKEVKEVATLSCGHNVSVEELAQTRIYWQKEKKMVLTMMSGDMNIWPEYKNRTIFDITNNLSIVIQALRPSDEGTYECVVLKYEKDGFKREHLAEVTLSVKADFPTPSISDFEIPTSNIRRIICSASGGFPEPHLSWLENGEELNAINTTVSQDPETELYAVSSKLDFNMTTNHSFMCLIKYGHLRVNQTFNWNTTKQEHFPDN

SEQ ID NO: 57 - protein, 208 aa, Artificial Sequence
  CD80 v3 ECD
VIHVTKEVKEVATLSCGHNVSVEELAQTRIYWQKEKKMVLTMMSGDMNIWPEYKNRTIFDITNNLSIVIQALRPSDEGTYECVVLKYEKDGFKREHLAEVTLSVKADFPTPSISDFEAPSSNIRRIICSASGGFPEPHLSWLENGEELNAINTTVSQDPETELYAVSSKLDFNMTTNHSFMCLIKYGHLRVNQTFNWNTTKQEHFPDN

SEQ ID NO: 58 - protein, 208 aa, Artificial Sequence
  CD80 v4 ECD
VIHMTKEVKEVATLSCGHNVSVEELAQTRIYWQKEKKMVLTMMSGDMNIWPEYKNRTIFDITNNLSIVIQALRPSDEGTYECVVLKYEKDGFKREHLAEVTLSVKADFPTPSISDFEIPSSNIRRIICSASGGFPEPHLSWLENGEELNAINTTVSQDPETELYAVSSKLDFNMTTNHSFMCLIKYGHLRVNQTFNWNTTKQEHFPDN

SEQ ID NO: 59 - protein, 208 aa, Artificial Sequence
  CD80 v5 ECD
VIHVTKEVKEVATLSCGHNVSVEELAQTRIYWQKEKKMVLTMMSGDMNIWPEYKNRTIFDITNNLSIVIQALRPSDEGTYECVVLKYEKDGFKREHLAEVTLSVKADFPTPSISDFEIPSSNIRRIICSASGGFPEPHLSWLENGEELNAINTTVSQDPETELYAVSSKLDFNMTTNHSFMCLIKYGHLRVNQTFNWNTTKQEHFPDN

SEQ ID NO: 60 - protein, 208 aa, Artificial Sequence
  CD80 v6 ECD
VIHVTKEVKEVATLSCGHNLSVEELAQTRIYWQKEKKMVLTMMSGDMNIWPEYKNRTIFDITNNLSIVIQALRPSDEGTYECVVLKYEKDSFKREHLAEVTLSVKADFPTPSISDFEIPSSNIRRIICSASGGFPEPHLSWLENGEELNAINTTVSQDPETELYAVSSKLDFNMTTNHSFMCLIKYGHLRVNQTFNWNTTKQEHFPDN

SEQ ID NO: 61 - protein, 208 aa, Artificial Sequence
  CD80 v7 ECD
VIHVTKEVKEVATLSCGHNVSVEELAQTRIYWQKEKKMVLTMMPGDMNIWPEYKNRTIFDITNNLSIVIQALRPSDEGTYECVVLKYEKDGFKREHLAEVTLSVKADFPTPSISDFEIPTSNIRRIICSASGGFPEPHLSWLENGEELNAINTTVSQDPETELYAVSSKLDFNMTTNHSFMCLIKYGHLRVNQTFNWNTTKQEHFPDN

SEQ ID NO: 62 - protein, 208 aa, Artificial Sequence
  CD80 v8 ECD
VIHVTKEVKEVATLSCGHNVSVEELAQTRIYWQKEKKMVLTMMSGDMNIWPEYKNRTIFDITNNLSIVIQALRPSDEGTYECVVLKYEKDGFKREHLAEVTLSVKADFPTPSISDFGIPSSNIRRIICSASGGFPEPHLSWLENGEELNAINTTVSQDPETELYAVSSKLDFNMTTNHSFMCLIKYGHLRVNQTFNWNTTKQEHFPDN

SEQ ID NO: 63 - protein, 208 aa, Artificial Sequence
  CD80 v9 ECD
VIHVTKEVKEVATLSCGHNVSVEELAQTRIYWQKEKKMVLTMMSGDMNIWPEYKNRTIFDITNNLSIVILALRPSDEGTYECVVLKYEKDGFKREHLAEVTLSVKADFPTPSISDFEIPSSNIRRIICSASGGFPEPHLSWLENGEELNAINTTVSQDPETELYAVSSKLDFNMTTNHSFMCLIKYGHLRVNQTFNWNTTKQEHFPDN

SEQ ID NO: 64 - protein, 208 aa, Artificial Sequence
  CD80 v10 ECD
VIHVTKEVKEVATLSCGHNVSVEELAQTRIYWQKEKKMVLTMMSGDMNIWPEYKNRTIFDITNNLSIVIRALRPSDEGTYECVVLKYEKDGFKREHLAEVTLSVKADFPTPSISDFEIPSSNIRRIICSASGGFPEPHLSWLENGEELNAINTTVSQDPETELYAVSSKLDFNMTTNHSFMCLIKYGHLRVNQTFNWNTTKQEHFPDN

SEQ ID NO: 65 - protein, 208 aa, Artificial Sequence
  CD80 v11 ECD
VIHVTKEVKEVATLSCGHNVSVEELAQTRIYWQKEKKMVLTMMSGDMNIWPEYKNRTIFDITNNLSIVIQALRPSDEGTYACVVLKYEKDGFKREHLAEVTLSVKADFPTPSISDFEIPSSNIRRITCSASGGFPEPHLSWLENGEELNAINTTVSQDPETELYAVSSKLDFNMTTNHSFMCLIKYGHLRVNQTFNWNTTKQEHFPDN

SEQ ID NO: 66 - protein, 208 aa, Artificial Sequence
  CD80 v12 ECD
VIHVTKEVKEVATLSCGHNVSVEELAQTRIYWQKEKKMVLTMMSGDMNIWPEYKNRTIFDITNNLSIVIQALRPSDEGTYECVVLKNEKDGFKREHLAEVTLSVKADFPTPSISDFEIPTSNIRRIICSASGGFPEPHLSWLENGEELNAINTTVSQDPETELYAVSSKLDFNMTTNHSFMCLIKYGHLRVNQTFNWNTTKQEHFPDN

SEQ ID NO: 67 - protein, 208 aa, Artificial Sequence
  CD80 v13 ECD
VIHVTKEVKEVATLSCGHNVSVEELAQSRIYWQKEKKMVLTMMSGDMNIWPEYKNRTIFDITNNLSIVIQALRPSDEGTYECVVLKYEKDGFKRKHLAEVTLSVKADFPTPSISDFEIPSSNIRRIICSASGGFPEPHLSWLENGEELNAINTTVSQDPETELYAVSSKLDFNMTTNHSFMCLIKYGHLRVNQTFNWNTTKQEHFPDN

SEQ ID NO: 68 - protein, 208 aa, Artificial Sequence
  CD80 v14 ECD
VIHVTKEVKEVATLSCGHNVSVEELAQTRIYWQKEKKMVLTMMSGDMNIWPEYKNRTIFDITSNLSIVIQALRPSDEGTYECVVLKYEKDGFKREHLAEVTLSVKADFPTPSISDFEIPSSNIRRIICSASGGFPEPHLSWLENGEELNAINTTVSQDPETELYAVSSKLDFNMTTNHSFMCLIKYGHLRVNQTFNWNTTKQEHFPDN

SEQ ID NO: 69 - protein, 208 aa, Artificial Sequence
  CD80 v15 ECD
VIHVTKEVKEVATLSCGHNVSVEELAQTRIYWQKEEKMVLTMMSGDMNIWPEYKNRTIFDITNNLSTVIQALRPSDEGTYECVVLKYEKDGFKREHLAEVTLSVKADFPTPSISDFEIPSSNIRRIICSASGGFPEPHLSWLENGEELNAITTTVSQDPETELYAVSSKLDFNMTTNHSFMCLIKYGHLRVNQTFNWNTTKQEHFPDN

SEQ ID NO: 70 - protein, 208 aa, Artificial Sequence
  CD80 v16 ECD
VIHVTKEVKEVATLSCGHNVSVEELAQTRIYWQKEKKMVLTMMSGDMNIWPGYKNRTIFDITNNLSIVIQALRPSDEGTYECVVLKYEKDGFKREHLAEVTLSVKADFPTPSISDFEIPSSNIRRIICSASGGFPEPHLSWLENGEELNAINTTVSQDPETELYAVSSKLDFNMTTNHSFMCLIKYGHLRVNQTFNWNTTKQEHFPDN

SEQ ID NO: 71 - protein, 208 aa, Artificial Sequence
  CD80 v17 ECD
VIHVTKEVKEVATLSCGHNVSVEELAQTRIYWQKEKEMVLTMMSGDMNIWPEYKNRTISDITNNLSIVIQALRPSDEGTYECVVLKYEKDGFKREHLAEVTLSVKADFPTPSISDFEIPSSNIRRIICSASGGFPEPHLSWLENGEELNAINTTVSQDPETELYAVSSKLDFNMTTNHSFMCLIKYGHLRVNQTFNWNTTKQEHFPDN

SEQ ID NO: 72 - protein, 208 aa, Artificial Sequence
  CD80 v18 ECD
VIHVTKEVKEVATLSCGHNVSVEELAQTRIYWQKEKKMVLTMMSGDMNIWPEYKNRTIFDITNNLSIVILALRPSDEGTYECVVLKYEKDGFKREHLAEVTLPVKADFPTPSISDFEIPTSNIRRIICSTSGGFPEPHLSWLENGEELNAINTTVSQDPETELYAVSSKLDFNMTTNHSFMCLIKYGHLRVNQTFNWNTTKQEHFPDN

SEQ ID NO: 73 - protein, 208 aa, Artificial Sequence
  CD80 v19 ECD
VIHVTKEVKEVATLSCGHNVSVEELAQTRIYWQKEKKMVLTMMSGDMNIWPEYKNRTIFDITNNLSIVILALRPSDEGTYECVVLKYEEDAFKREHLAEVTLSVKADFPTPSISDFEIPTSNIRRIICSASGGFPEPHLSWLENGEELNAINTTVSQDPETELYAVSSKLDFNMTTNHSFMCLIKYGHLRVNQTFNWNTTKQEHFPDN

SEQ ID NO: 74 - protein, 208 aa, Artificial Sequence
  CD80 v20 ECD
VIHVTKEVKEVATLSCGHNVSVEELAQTRIYWQKEKKMVLTMMSGDMNIWPEYKNRTIFDITNNLSIVILALRPSDEGTYECVVLKYEKDGFKREHLAEVTLSVKADFPTPSISDFEIPTSNIRRIICSTSGGFPEPHLSWLENGEELNAINTTVSQDPETELYAVSSKLDFNMTTNHSFMCLIKYGHLRVNQTFNWNTTKQEHFPDN

SEQ ID NO: 75 - protein, 208 aa, Artificial Sequence
  CD80 v21 ECD
VIHVTKEVKEVATLSCGHNVSVEELAQTRIYWQKEKKMVLTMMSGDMNIWPEYKNRTIFVITNNLSIVILALRPSDEGTYECVVLKYEKDGFKREHLAEVTLSVKADFPTPSISDFEIPSSNIRRIICSASGGFPEPHLSWLENGEELNAINTTVSQDPETELYAVSSKLDFNMTTNHSFMCLIKYGHLRVNQTFNWNTTKQEHFPDN

SEQ ID NO: 76 - protein, 208 aa, Artificial Sequence
  CD80 v22 ECD
VIHVTKEVKEVATLSCGHNVSVEELAQTRIYWQKEKKMVLTMMSGDMNIWPEYMNRTIFDITNNLSIVILALRPSDEGTYECVVLKYEKDGFKREHLAEVTLSVKADFPTPSISDFEIPSSNIRRIICSTSGGFPEPHLSWLENGEELNAINTTVSQDPETELYAVSSKLDFNMTTNHSFMCLIKYGHLRVNQTFNWNTTKQEHFPDN

SEQ ID NO: 77 - protein, 208 aa, Artificial Sequence
  CD80 v23 ECD
VIHVTKEVKEVATLSCGHNVSVEELAQTRIYWQKEKKTVLTMMSGDMNIWPEYKNRTIFDITNNLSIVIQALRPSDGGTYECVVLKYEKDGFKREHLAEVTLSVKADFPTPSISDFEIPSSNIRRIICSASGGFPEPHLSWLENGEELNAITTTVSQDPETELYAVSSKLDFNMTTNHSFMCLIKYGHLRVNQTFNWNTTKQEHFPDN

SEQ ID NO: 78 - protein, 208 aa, Artificial Sequence
  CD80 v24 ECD
VIHVTKEVKEVATLSCGHNVSVEELAQTHIYWQKEKKMVLTMMSGDMNIWPGYKNRTIFDITNNLSIVIRALRPSDEGTYECVVLKYGKDGFKREHLAEVTLSVKADFPTPSISDFEIPTSNIRRIICSASGGFPEPHLSWLENGEELNAINTTVSQDPETELYAVSSKLDFNMTTNHSFMCLIKYGHLRVNQTFNWNTTKQEHFPDN

SEQ ID NO: 79 - protein, 208 aa, Artificial Sequence
  CD80 v25 ECD
VIHVTKEVKEVATLSCGHNVSVEELAQTRIHWQKEKKMVLGMMSGDMNIWPEYKNRTIFDITNNLSIVIQALRPSDEGTYECVVLKYEKDGFKREHLAEVTLSVKADFPTPSISDFEIPSSNIRRIICSASGGFPEPHLSWLENGEELNAINTTVSQDPETELYAVSSKLDFNMTTNHSFMCLIKYGHLRVNQTFNWNTTKQEHFPDN

SEQ ID NO: 80 - protein, 208 aa, Artificial Sequence
  CD80 v26 ECD
VIHVTKEVKEVATLSCGHNVSVEELAQTRIYWQKEKKMVLTMMSGDMNIWPEYKNRTIFDITNNLSIAILALRPSDEGTYECVVLKYEKDAFKREHLAEVTLSVKADFPAPSISDFEIPTSNIRRIICSTSGGFPEPHLSWLENGEELNAINTTVSQDPETELYAVSSKLDFNMTTNHSFMCLIKYGHLRVNQTFNWNTTKQEHFPDN

SEQ ID NO: 81 - protein, 208 aa, Artificial Sequence
  CD80 v27 ECD
VIHVTKEVKEVATLSCGHNVSVEELAQTRIYWQKEKKMVLTMMSGDMNIWPEYKNRTIFDITNNLHIVILALRPSDEGTYECVVLKYEKGAFKREHLAEVTLSVKADFPAPSISDLEIPTSNIRRIICSTSGGFPEPHLSWLENGEELNAINTTVSQDPETELYAVSSKLDFNMTTNHSFMCLIKYGHLRVNQTFNWNTTKQEHFPDN

SEQ ID NO: 82 - protein, 208 aa, Artificial Sequence
  CD80 v28 ECD
VIHVTKEVKEVATLSCGHNVSVEELAQTHIYWQKEKKMVLTMMSGDMNIWPGYKNRTIFDITNNLSIVILALRPSDEGTYECVVLKYEKDAFKREHLAEVTLSVKADFPTPSISDFEIPSSNIRRIICSASGGFPEPHLSWLENGEELNAINTTVSQDPETELYAVSSKLDFNMTTNHSFMCLIKYGHLRVNQTFNWNTTKQEHFPDN

SEQ ID NO: 83 - protein, 208 aa, Artificial Sequence
  CD80 v29 ECD
VIHVTKEVKEVATLSCGHNVSVEELAQTRIYWQKEKKMVLTMMSGDMNIWPEYKNRTIFDITNNLSIVILALRPSDEGTYECVVLKYEKDGFKREHLAEVTSSVKADFPTPSISDFEIPTSNIRRIICSTSGGFPEPHLSWLENGEELNAINTTVSQDPETELYAVSSKLDFNMTTNHSFMCLIKYGHLRVNQTFNWNTTKQEHFPDN

SEQ ID NO: 84 - protein, 208 aa, Artificial Sequence
  CD80 v30 ECD
VIHVTKEVKEVATLSCGHNVSVEELAQTRIYWQKEKKMVLTMMSGDMNIWPEYKNRTIFDITNNLSTVIQALRPSDEGTYECVVLKYEKDGFKREHLAEVTLSVKADFPTPSISDFEIPSSNIRRIICSTSGGFPEPHLSWLENGEELNAINTTVSQDPETELYAVSSKLDFNMTTNHSFMCLIKYGHLRVNQTFNWNTTKQEHFPDN

SEQ ID NO: 85 - protein, 208 aa, Artificial Sequence
  CD80 v31 ECD
VIHVTKEVKEVATLSCGHNVSVEELAQTRIYWQKEKKMVLTMMSGDMNIWPEYKNRTIFDITNNLSIVIQALRPSDEGTYECVVLKYEKDGFKREHLAEVTLSVKADFPAPSISDFEIPSSNIRRIICSASGGFPEPHLSWLENGEELNAINTTVSQDPETELYAVSSKLDFNMTTNHSFMCLIKYGHLRVNQTFNWNTTKQEHFPDN

SEQ ID NO: 86 - protein, 208 aa, Artificial Sequence
  CD80 v32 ECD
VIHVTKEVKEVATLSCGHNVSVEELAQTRIYWQKEKKVVLDMISGDMNIGPEYKNRTIFDITNNLSIVILALRPSGEGTYECAVLKYEEDAFKREHLAEVTLSVKADFPTPSISDFEIPSSNIRRIICSASGGFPEPHLSWLENGEELNAINTTVSQDPETELYAVSSKLDFNMTTNHSFMCLIKYGHLRVNQTFNWNTTKQEHFPDN

SEQ ID NO: 87 - protein, 208 aa, Artificial Sequence
  CD80 v33 ECD
VIHVTKEVKEVATLSCGHNVSAEELAQTRIYWQKEKKMVLTMMSGDMNIWPEYKNRTIFDITNNLSIVIQALRPSDEGTYECVVLKYEKDAFKREHLAEVTLSVKADFPTPSISDFEIPTPNIRRIICSTSGGFPEPHLSWLENGEELNAINTTVSQDPETELYAVSSKLDFNMTTNHSFMCLIKYGHLRVNQTFNWNTTKQEHFPDN

SEQ ID NO: 88 - protein, 208 aa, Artificial Sequence
  CD80 v34 ECD
VIHVTKEVKEVVTLFCGHNVSVEELAQTRIHWQKEKKMVLGMMSGDMNIWPEYKNRTIFDITNNLSIVILALRPSDEGTYECVVLKYEKDAFKREHLAEVTLSVKADFPTPSISDFEIPTSNIRRIICSASGGFPELHLSWLENGEELNAITTTVSQDPETELYAVSSKLDFNMTTNHSFMCLIKYGHLRVNQTFNWNTTKQEHFPDN

SEQ ID NO: 89 - protein, 208 aa, Artificial Sequence
  CD80 v35 ECD
VIHVTKEVKEVATLSCGHNVSVEELAQTRIYWQKEKKMVLTMMSGDMNIWPEYKNRTIFDITNNLSFVIRALRPSDEGTYECVVLKYGKDGFKREHLAEVTLSVKADFPTPSISDFEIPSSNIRRIICSASGGFPEPHLSWLENGEELNAINTTVSQDPETELYAVSSKLDFNMTTNHSFMCLIKYGHLRVNQTFNWNTTKQEHFPDN

SEQ ID NO: 90 - protein, 208 aa, Artificial Sequence
  CD80 v36 ECD
VIHVTKEVKEVATLSCGHNVSVEGPAQTRIYWQKEKKMVLTMMSGDMNIWPEYKNRTIFDITNNLSIVIQALRPSDEGTYECVVLKYEKDAFKREHLAEVTLSVKADFPTPSISDFEIPSSNIRRIICSTSGGFPEPHLSWLENGEELNAINTTVSQDPETELYAVSSKLDFNMTTNHSFMCLIKYGHLRVNQTFNWNTTKQEHFPDN

SEQ ID NO: 91 - protein, 208 aa, Artificial Sequence
  CD80 v37 ECD
VIHVTKEVKEVATLSCGHNVSVEELAQTRIYWQKEKKMVLTMMSGDMNIWPEYKNRTIFDITNNLSIVILALRPSDEGTYECVVLKYEKDGLKREHLAEVTLSVKADLPTPSISDFEIPSSNIRRIICSTSGGFPEPHLSWLENGEELNAINTTVSQDPETELYAVSSKLDFNMTTNHSFMCLIKYGHLRVNQTFNWNTTKQEHFPDN

SEQ ID NO: 92 - protein, 208 aa, Artificial Sequence
  CD80 v38 ECD
VIHVTKEVKEVATLSCGHNVSVEELAQTDILWHKEGKIVLAMRSGDTNIWPEYKNRTIFDITNNLSIVILALRPSDEGTYVCVVRKYENDTPVLEHLAEVTLSVKADFPTPSISDFETPTSNIRRIICSTSGGFPEPHLSWLENGEELSAINTTVSQDPETELYAVSSKLDFNMTTNHSFMCLIKYGHLRVNQTFNWNTTKQEHFPDN

SEQ ID NO: 93 - protein, 208 aa, Artificial Sequence
  CD80 v39 ECD
VIHVTKEVKEVATLSCGHNVSVEELAQTDILWHKEGKIVLAMRSGDTNIWPEYKNRTIFDITNNLSIVILALRPSDEGTYVCVVRKYENDTPVLEHLAEVTLSVKADFPTPSISDFEIPTSNIRRIICSTSGGFPEPHLSWLESGEELSAINTTVSQDPETELYAVSSKLDFNMTTNHSFMCLIKYGHLRVNQTFNWNTTKQEHFPDN

SEQ ID NO: 94 - protein, 208 aa, Artificial Sequence
  CD80 v40 ECD
VIHVTKEVKEVATLSCGHNVSVEELAQTDILWHKEGKIVLATRSGDTNIWPEYKNRTIFDITNNLSIVILALRPSDEGTYVCVVRKYENDTPVLEHLAEVTLSVKADFPTPSISDFEIPTSNIRRIICSTSGGFPEPHLSWLENGEESSAINTTVSQDPETELYAVSSKLDFNMTTNHSFMCLIKYGHLRVNQTFNWNTTKQEHFPDN

SEQ ID NO: 95 - protein, 208 aa, Artificial Sequence
  CD80 v41 ECD
VIHVTKEVKEVATLSCGHNVSVEGLAQTDILWHKEGKIVLAMRSGDTNIWPEYKNRTILDITNNLSIVILALRPSDEGTYVCVVRKYENDTPVLERLAEVTLSVKADFPTPSISDFEIPTSNIRRIICSTSGGFPEPHLSWLENGEELSAINTTVSQDPETELYAVSSKLDFNMTTNHSFMSLIKYGHLRVNQTFNWNTTKQEHFPDN

SEQ ID NO: 96 - protein, 208 aa, Artificial Sequence
  CD80 v42 ECD
VIHVTKEVKEVATLSCGHNVSVEELAQTDILWHKEGKIVLAMRSGDTNIWPEYKNRTIFDITNNLSIVILALRPSDEGTYVCVVRKYENDTPVLEHLAEVTLSVKADFPTPSISDFEIPTSNIRRIICSTSGGFPEPHLSWLENGEELSAINTTVSQDPETELYAVSSKLDFNMTTNHSFMCLIKYGHLRVNQTFNWNTTKQEHFPDN

SEQ ID NO: 97 - protein, 208 aa, Artificial Sequence
  CD80 v43 ECD
VIHVTKEVKEVATLSCGHNVSVEELAQTVIYWQKEKKMVLTMQSGDMNIWPEYKNRTIFDITNNLSIVILALRPSDEGTYRCVVIKYERLENQGEHLAEVTLSVKADFPTPSISDFEIPTSNIRRIICSTSGGFPEPHLSWLENGEELNAINTTVSQDPETELYAVSSKLDFNMTTNHSFMCLIKYGHLRVNQTFNWNTTKQEHFPDN

SEQ ID NO: 98 - protein, 208 aa, Artificial Sequence
  CD80 v44 ECD
VIHVTKEVKEVATLSCGHNVSVEELAQTRIYWQKEKKMVLIMMSGDMNIWPEYKNRTIFDITNNLSIVILALRPSDEGTYECVVLKYEKDGFKREHLAEVTLSVKADFPTPSISDFEIPTSNIRRIICSTSGGFPEPHLSWLENGEELNAINTTVSQDPETELYAVSSKLDFNMTTNHSFMCLIKYGHLRVNQTFNWNTTKQEHFPDN

SEQ ID NO: 99 - protein, 208 aa, Artificial Sequence
  CD80 v45 ECD
VIHVTKEVKEVATLSCGHNVSVEELAQTRIYWQKEKKMVLTMMSGDMNIWPEYKNRTIFDITNNLSIVILALRPSDEGTYECVVLKYERKGYRREHLAEVTLSVKADFPTPSISDFEIPTSSIRRIICSTSGGFPEPHLSWLENGEELNAINTTVSQDPETELYAVSSKLDFNMTTSHSFMCLIKYGHLRVNQTFNWNTTKQEHFPDN

SEQ ID NO: 100 - protein, 208 aa, Artificial Sequence
  CD80 v46 ECD
VIHVTKEVKEVATLSCGHNVSVEELAQTRIYWQKEKKMVLTMMSGDMNIWPEYKNRTIFDITNNLSIVILALRPSDEGTYECVVLKYERKGYRREHLAEVTLSVKADFPTPSISDFEIPTSNIRRIICSTSGGFPEPHLSWLENGEELNAINTTVSQDPETELYAVSSKLDFNMTTNHSFMCLIKYGHLRVNQTFNWNTTKQEHFPDN

SEQ ID NO: 101 - protein, 208 aa, Artificial Sequence
  CD80 v47 ECD
VIHVTKEVKEVATLSCGHNVSVEELAQTRIYWQKEGQIVLTMMSGDMNIWPEYKNRTILDITNNLSIVILALRPSDEGTYVCVVRKYENDTPVLEHLAGVTLSVKADFPTPSISDFEIPTSNIRRIICSASGGFPEPHLSWLENGEELSAINTTVSQDPETELYAVSSKLDFNMTTNHSFMCLIKYGHLRVNQTFNWNTTKQEHFPDN

SEQ ID NO: 102 - protein, 208 aa, Artificial Sequence
  CD80 v48 ECD
VIHVTKEVKEVATLSCGHNVSVEELAQTRIYWQKEKKMVLTMMSGDMNIWPEYKNRTIFDITNNLSIVILALRPSDEGTYECVVLKYDRKGYRREHLAEVTLSVKADFPTPSISDFEIPTSNIRRIICSTSGGFPEPHLSWLENGEELNAINTTVSQDPETELYAVSSKLDFNMTTNHSFMCLIKYGHLRVNQTFNWNTTKQEHFPDN

SEQ ID NO: 103 - protein, 208 aa, Artificial Sequence
  CD80 v49 ECD
VIHVTKEVKEVATLSCGHNVSVEELAQTRIYWQKEGQIVMTMMSGDMNIWPEYKNRTIFDITNNLSIVILALRPSDEGTYECVVLKYEKDAFKREHLAEVTLSVKADFPTPSISDFEIPTSNIRRIICSTSGGFPEPHLSWLENGEELNAINTTVSQDPETELYAVSSKLDFNMTTNHSFMCLIKYGHLRVNQTFNWNTTKQEHFPDN

SEQ ID NO: 104 - protein, 208 aa, Artificial Sequence
  CD80 v50 ECD
VIHVTKEVKEVATLSCGHNVSVEELAQTRIYWQKEGKMVLTMMSGDMNIWPEYKNRTIFDITNNLSIVILALRPSDEGTYECVVLKYEKDAFKREHLAEVTLSVKADFPTPSISDFEIPTSNIRRIICSTSGGFPEPHLSWLENGEELNAINTTVSQDPETELYAVSSKLDFNMTTNHSFMCLIKYGHLRVNQTFNWNTTKQEHFPDN

SEQ ID NO: 105 - protein, 208 aa, Artificial Sequence
  CD80 v51 ECD
VIHVTKEVKEVATLSCGHNVSVEELAQTHIHWQKEKKMVLGMMSGDMNIWPEYKNRTIFDITNNLSIVILALRPSDEGTYECVVLKNGENGFKREHLAEVTLSVKADFSTPSISDFEIPTSNIRRIICSTSGGFPEPHLSWLENGEELNAINTTVSQDPETELYAVSSKLDFNMTTNHSFMCLIKYGHLRVNQTFNWNTTKQEHFPDN

SEQ ID NO: 106 - protein, 208 aa, Artificial Sequence
  CD80 v52 ECD
VIHVTKEVKEVTTLSCGLNVSVEELAQTRIYWQKEKKMVLTMVSGDMNIWPEYKNRTILDITNNLSIVILALRPSDKGTYECVVLKYEKDAFKREHLAEVTLSVKADFSTPSISDFETPTSNIRRIICSTSGGFPEPHLSWLENGEELNAINTTVSQDPETELYAVSSKLDFNMTTNHSFMCLIKYGHLRVNQTFNWNTTKQEHFPDN

SEQ ID NO: 107 - protein, 208 aa, Artificial Sequence
  CD80 v53 ECD
VIHVTKEVKEVATLSCGHNVSVEELAQTVIFWQKEGKLVLTMQSGDMNIWPEYKNRTIFDITNNLSIVILALRPSDEGTYRCIVIKYERLENQGEHLAEVTLSVKADFPTPSISDFEIPTSNIRRIICSTSGGFPEPHLSWLENGEELNAINTTVSQDPETELYAVSSKLDFNMTTNHSFMCLIKYGHLRVNQTFNWNTTKQEHFPDN

SEQ ID NO: 108 - protein, 208 aa, Artificial Sequence
  CD80 v54 ECD
VIHVTKEVKEVATLSCGHNVSVEELAQTRIYWQKEKKMVLTMMSGDMNIWPEYKNRTIFDITNNLSIMIPAPRPSDEGTYECVVLEYEKDAFKREHLAEVTLSVKADFPTPSISDFEIPTSNIRRIICSTSGGFPEPHLSWLENGEELNAINTTVSQDPETELYAVSSKLDFNMTTNHSFMCLIKYGHLRVNQTFNWNTTKQEHFPDN

SEQ ID NO: 109 - protein, 238 aa, Artificial Sequence
  ICOSL v1 ECD
DTQEKEVRAMVGSDVELSCACPEGSRFDLNDVYVYWQTSESKTVVTYHIPQSSSLENVDSRYRNRALMSPAGMLRGDFSLRLFNVTPQDEQKFHCLVLSQSLGFQEVLSVEVTLHVAANFSVPVVSAPHSPSQDELTFTCTSINGYPRPNVYWINKTDNSLLDQALQNDTVFLNMRGLYDVVSVLRIARTPSVNIGCCIENVLLQQNLTVGSQTGNDIGERDKITENPVSTGEKNAAT

SEQ ID NO: 110 - protein, 238 aa, Artificial Sequence
  ICOSL v2 ECD
DTQEKEVRAMVGSDVELSCACPEGSRFDLNDVYVYWQTSESKTVVTYHIPQHSSLENVDSRYRNRALMSPAGMLRGDFSLRLFNVTPQDEQKFHCLVLSQSLGFQEVLSVEVTLHVAANFSVPVVSAPHSPSQDELTFTCTSINGYPRPNVYWINKTDNSLLDQALQNDTVFLNMRGLYDVVSVLRIARTPSVNIGCCIENVLLQQNLTVGSQTGNDIGERDKITENPVSTGEKNAAT

SEQ ID NO: 111 - protein, 238 aa, Artificial Sequence
  ICOSL v3 ECD
DTQEKEVRAMVGSDVELSCACPEGSRFDLNDVYVYWQTSESKTVVTYHIPQDSSLENVDSRYRNRALMSPAGMLRGDFSLRLFNVTPQDEQKFHCLVLSQSLGFQEVLSVEVTLHVAANFSVPVVSAPHSPSQDELTFTCTSINGYPRPNVYWINKTDNSLLDQALQNDTVFLNMRGLYDVVSVLRIARTPSVNIGCCIENVLLQQNLTVGSQTGNDIGERDKITENPVSTGEKNAAT

SEQ ID NO: 112 - protein, 238 aa, Artificial Sequence
  ICOSL v4 ECD
DTQEKEVRAMVGSDVELSCACPEGSRFDLNDVYVYWQTSESKTVVTYHIPQYSSLEYVDSRYRNRALMSPAGMLRGDFSLRLFNVTPQDEQKFHCLVLSQSLGFQEVLSVEVTLHVAANFSVPVVSAPHSPSQDELTLTCTSINGYPRPNVYWINKTDNSLLDQALQNDTVFLNMRGLYDVVSVLRIARTPSVNIGCCIENVPLQQNLTVGSQTGNDIGERDKITENPVSTGEKNAAT

SEQ ID NO: 113 - protein, 238 aa, Artificial Sequence
  ICOSL v5 ECD
DTQEKEVRAMVGSDVELSCACPEGSRFDLNDVYVYWQTSESKTVVTYHIPQHSSLEYVDSRYRNRALMSPAGMLRGDFSLRLFNVTPQDEQKFHCLVLSPSLGFQEVLSVEVTLHVAANFSVPVVSAPHSPSQDELTFTCTSINGYPRPNVYWINKTDNSLLDQALQNDTVFLNMRGLYDVVSVLRIARTPSVNIGCCIENVLLQQNLTVGSQTGNDIGERDKITENPVSTGEKNAAT

SEQ ID NO: 114 - protein, 238 aa, Artificial Sequence
  ICOSL v6 ECD
DTQEKEVRAMVGSDVELSCACPEGSRFDLNDVYVYWQTSESKTVVTYHIPQSSSLENVDSRYRNRALMSPAGMLRGDFSLRLFNVTPQDEQKFHCLVLSQSLGFQEVLSVEVTLHVAANFSVPVVSAPHSPSQDELTFTCTSINGCPRPNVCWINKTDNSLLDQALQNDTVFLNMRGLYDVVSVLRIARTPSVNIGCCIENVLLQQNLTVGSQTGNDIGERDKITENPVSTGEKNAAT

SEQ ID NO: 115 - protein, 238 aa, Artificial Sequence
  ICOSL v7 ECD
DTQEKEVRAMVGSDVELSCACPEGSRFDLNDVYVYWQTSESKTVVTYHIPQHSSLENVDSRYRNRALMSPAGMLRGDFSLRLFNVTPQDEQKFHCLVLSQSLGFQEVLSVEVTLHVAANFSVPVVSAPHSPSQDELTFTCTSINGYPRPNVYWINKTDNSLLDQALQNDTVFLNMRGLYDVVSVLRIARTPSVNIGCRIENVLLQQNLTVGSQTGNDIGERDKITENPVSTGEKNAAT

SEQ ID NO: 116 - protein, 238 aa, Artificial Sequence
  ICOSL v8 ECD
DTQEKEVRAMVGSDVELSCACPEGSRFDLNDVYVYWQTSESKTVVTYHIPQHSSLENVDSRYRNRALMSPAGMLRGDFSLRLFNVTPQDEQKFHCLVLSQSLGFQEVLSVEVTLHVAANFSVPVVSAPHSPSQDELTFTDTSINGYPRPNVYWINKTDNSLLDQALQNDTVFLNMRGLYDVVSVLRIARTPSVNIGCCIENVLLQQNLTVGSQTGNDIGERDKIAENPVSTGEKNAAT

SEQ ID NO: 117 - protein, 238 aa, Artificial Sequence
  ICOSL v9 ECD
DTQEKEVRAMVGSDVELSCACPEGSRFDLNDVYVYWQTSESKTVVTYHIPQHSSLENVDSRYRNRALMSPAGMLRGDFSLRLFNVTPQDEQKFHCLVLSQSLGFQEVLSVEVTLHVAANFSVPVVSAPHSPSQDELTFTCTSINGYPRPNVYWINKTDNSLLDQALQNDTVFLNMRGLYDVVSVLRIARTPSVNIGCRIENVLLQQNLTVGSQTGNDIGERDKIAENPVSTGEKNAAT

SEQ ID NO: 118 - protein, 238 aa, Artificial Sequence
  ICOSL v10 ECD
DTQEKEVRAMVGSDVELSCACPEGSRFDLNDVYVYWQTSESKTVVTYHIPQHSSLENVDSRYRNRALMSPAGMLRGDFSLRLFNVTPQDEQRFHCLVLSQSLGFQEVLSVEVTLHVAANFSVPVVSAPHSPSQDELTFTCTSINGYPRPNVYWINKTDNSLLDQALQNDTVFLNMRGLYDVVSVLRIARTPSVNIGCCIENVLLQQNLTVGSQTGNDIGERDKITENPVSTGEKNAAT

SEQ ID NO: 119 - protein, 238 aa, Artificial Sequence
  ICOSL v11 ECD
DTQEKEVRAMVGSDVELSCACPEGSRFDLNDVYVYWQTSESKTVVTYHIPQHSSLENVDSRYRNRALMSPAGMLRGDFSLRLFNVTPQDEQKFHCLVLGQSLGFQEVLSVEVTLHVAANFSVPVVSAPHSPSQDELTFTCTSINGYPRPNVYWINKTDNSLLDQALQNDTVFLNMRGLYDVVSVLRIARTPSVNIGCCIENVLLQQNLTVGSQTGNDIGERDKITENPVSTGEKNAAT

SEQ ID NO: 120 - protein, 238 aa, Artificial Sequence
  ICOSL v12 ECD
DTQEKEVRAMVGSDVELSCACPEGSRFDLNDVYVYWQTSESKTVVTYHIPQYSSLENVDSRYRNRALMSPAGMLRGDFSLRLFNVTPQDEQKFHCLVLSQSLGFQEVLSVEVTLHVAANFSVPVVSAPHSPSQDELTFTCTSINGYPRPNVYWINKTDNSLLDQALQNDTVFLNMRGLYDVVSVLRIARTPSVNIGCCIENVLLQQNLTVGSQTGNDIGERDKITENPVSTGEKNAAT

SEQ ID NO: 121 - protein, 238 aa, Artificial Sequence
  ICOSL v13 ECD
DTQEKEVRAMVGSDVELSCACPEGSRFDLNDVYVYWQTSESKTVVTYHIPQNSSLEYVDSRYRNRALMSPAGMLRGDFSLRLFNVTPQDEQKFHCLVLSQSLGFQEVLSVEVTLHVAANFSVPVVSAPHSPSQDELTFTCTSINGYPRPNVYWINKTDNSLLDQALQNDTVFLNMRGLYDVVSVLRIARTPSVNIGCCIENVLLQQNLTVGSQTGNDIGERDKITENPVSTGEKNAAT

SEQ ID NO: 122 - protein, 238 aa, Artificial Sequence
  ICOSL v14 ECD
DTQEKEVRAMVGSDVELSCACPEGSRFDLNDVYVYWQTSESKTVVTYHIPQNSSLEYVDSRYRNRALMSPAGMLRGDFSLRLFNVTPQDEQKFHCLVLSPSLGFQEVLSVEVTLHVAANFSVPVVSAPHSPSQDELTFTCTSINGYPRPNVYWINKTDNSLLDQALQNDTVFLNMRGLYDVVSVLRIARTPSVNIGCCIENVLLQQNLTVGSQTGNDIGERDKITENPVSTGEKNAAT

SEQ ID NO: 123 - protein, 238 aa, Artificial Sequence
  ICOSL v15 ECD
DTQEKEVRAMVGSDVELSCACPEGSRFDLNDVYVYWQTSESKTVVTYHIPQSSSLENVDSRYRNRALMSPAGMLRGDFSLRLFNVTPQDEQKFHCLVLSQSLGFQEVLSVEVTLHVAANFSVPVVSAPHGPSQDELTFTCTSINGYPRPNVCWINKTDNSLLDQALQNDTVFLNMRGLYDVVSVLRIARTPSVNIGCCIENVLLQQNLTVGSQTGNDIGERDKITENPVSTGEKNAAT

SEQ ID NO: 124 - protein, 238 aa, Artificial Sequence
  ICOSL v16 ECD
DTQEKEVRAMVGSDVELSCACPEGSRFDLNDVYVYWQTSESKTVVTYHIPQSSSLENVDSRYRNRALMSPAGMLRGDFSLRLFNVTPQDEQKFHCLVLSQSLGFQEVLSVEVTLHVAANFSVPVVSAPHSPSQDELTFTCTSINGYPRPNVCWINKTDNSLLDQALQNDTVFLNMRGLYDVVSVLRIARTPSVNIGCCIENVLLQQNLTVGSQTGNDIGERDKITENPVSTGEKNAAT

SEQ ID NO: 125 - protein, 238 aa, Artificial Sequence
  ICOSL v17 ECD
DTQEKEVRAMVGSDVELSCACPEGSRFDLNDVYVYWQTSESKTVVTYHIPQSSSLENVDSRYRNRALMSPAGMLRGDFSLRLFNVTPQDEQKFHCLVLSQSLGFQEVLSVEVTLHVAANFSVPVVSAPHSPSQDELTFTCTSINGYPRPNVYWINKTDNSLLDQALQNDTVFLNMRGLYDVVSVLRIARTPSVNIGCRIENVLLQQNLTVGSQTGNDIGERDKITENPVSTGEKNAAT

SEQ ID NO: 126 - protein, 238 aa, Artificial Sequence
  ICOSL v18 ECD
DTQEKEVRAMVGSDVELSCACPEGSRFDLNDVYVYWQTSESKTVVTYHIPQYSSLEYVDSRYRNRALMSPAGMLRGDFSLRLFNVTPQDEQKFHCLVLSQSLGFQEVLSVEVTLHVAANFSVPVVSAPHSPSQDELTFTCTSINGYPRPNVCWINKTDNSLLDQALQNDTVFLNMRGLYDVVSVLRIARTPSVNIGCCIENVLLQQNLTVGSQTGNDIGERDKITENPVSTGEKNAAT

SEQ ID NO: 127 - protein, 238 aa, Artificial Sequence
  ICOSL v19 ECD
DTQEKEVRAMVGSDVELSCACPEGSRFDLNDVYVYWQTSESKTVVTYHIPQYSSLEYVDSRYRNRALMSPAGMLRGDFSLRLFNVTPQDEQKFHCLVLSQSLGFQEVLSVEVTLHVAANFSVPVVSAPPSPSQDELTFTCTSINGYPRPNVYWINKTDNSLLDQALQNDTVFLNMRGLYDVVSVLRIARTPSVNIGCRIENVLLQQNLTVGSQTGNDIGERDKITENPVSTGEKNAAT

SEQ ID NO: 128 - protein, 238 aa, Artificial Sequence
  ICOSL v20 ECD
DTQEKEVRAMVGSDVELSCACPEGSRFDLNDVYVYWQTSESKTVVTYHIPQHSSLENVDSRYRNRALMSPAGMLRGDFSLRLFNVTPQDEQKFHCLVLSQSLGFQEVLSVEVTLHVAANFSVPVVSAPHSPSQDELTFTCTSINGYPRPNVYWINKTDNSPLDQALQNDTVFLNMRGLYDVVSVLRIARTPSVNIGCRIENVLLQQNLTVGSQTGNDIGERDKITENPVSTGEKNAAT

SEQ ID NO: 129 - protein, 238 aa, Artificial Sequence
  ICOSL v21 ECD
DTQEKEVRAMVGSDVELSCACPEGSRFDLNDVYVYWQTSESKTVVTYHIPQSSSLENVDSRYRNRALMSPAGMLRGDFSLRLFNVTPQDEQKFHCLVLSQSLGFQEVLSVEVELHVAANFSVPVVSAPHSPSQDELTFTCTSINGYPRPNVYWINKTDNSLLDQALQNDTVFLNMRGLYDVVSVLRIARTPSVNIGCCIENVLLQQNLTVGSQTGNDIGERDKITENPVSTGEKNAAT

SEQ ID NO: 130 - protein, 238 aa, Artificial Sequence
  ICOSL v22 ECD
DTQEKEVRAMVGSDVELSCACPEGSRFDLNDVYVYWQTSESKTVVTYHIPQNSALENVDSRYRNRALMSPAGMLRGDFSLRLFNVTPQDEQKFHCLVLSQSLGFQEVLSVEVTLHVAANFSVPVVSAPHSPSQDELTFTCTSINGYPRPNVYWINKTDNSLLDQALQNDTVFLNMRGLYDVVSVLRIARTPSVNIGCCIENVLLQQNLTVGSQTGNDIGERDKITENPVSTGEKNAAT

SEQ ID NO: 131 - protein, 238 aa, Artificial Sequence
  ICOSL v23 ECD
DTQEKEVRAMVGSDVELSCACPEGSRFDLNDVYVYWQTSESKTVVTYHIPQDSPLENVDSRYRNRALMSPAGMLRGDFSLRLFNVTPQDEQKFHCLVLSQSLGFQEVLSVEVTLHVAANFSVPVVSAPHSPSQDELTFTCTSINGYPRPNVYWINKTDNSLLDQALQNDTVFLNMRGLYDVVSVLRIARTPSVNIGCCIENVLLQQNLTVGSQTGNDIGERDKITENPVSTGEKNAAT

SEQ ID NO: 132 - protein, 238 aa, Artificial Sequence
  ICOSL v24 ECD
DTQEKEVRAMVGSDVELSCACPEGSRFDLNDVYVYWQTSESKTVVTYHIPQKSSLENVDSRYRNRALMSPAGMLRGDFSLRLFNVTPQDEQKFHCLVLSQSLGFQEVLSVEVTLHVAANFSVPVVSAPHSPSQDELTFTCTSINGYPRPNVYWINKTDNSLLDQALQNDTVFLNMRGLYDVVSVLRIARTPSVNIGCCIENVLLQQNPTVGSQTGNDIGERDKITENPVSTGEKNAAT

SEQ ID NO: 133 - protein, 238 aa, Artificial Sequence
  ICOSL v25 ECD
DTQEKEVRAMVGSDVELSCACPEGSRFDLNDVYVYWQTSESKTVVTYHIPQSSSLENVDSRYRNRALMSPAGMLRGDFSLRLFNVTPQDEQKFHCLVLSQSLGFQEVLSVEVTLHVAANFSVPVVSAPHSPSQDELTFTCTSINGYPRPNVHWINKTDNSLLDQALQNDTVFLNMRGLYDVVSVLRIARTPSVNIGCCIENVLLQQNLTVGSQTGNDIGERDKITENPVSTGEKNAAT

SEQ ID NO: 134 - protein, 238 aa, Artificial Sequence
  ICOSL v26 ECD
DTQEKEVRAMVGSDVELSCACPEGSRFDLNDVYVYWQTSESKTVVTYHIPQDSSLENVDSRYRNRALMSPAGMLRGDFSLRLFNVTPQDEQKFHCLVLSQSLGFQEVLSVEVTLHVAANFSVPVVSAPHSPSQDELTFTCTSINGYPRPNAYWINKTDNSLLDQALQNDTVFLNMRGLYDVVSVLRIARTPSVNIGCCIENVLLQQNLTVGSQTGNDIGERDKITENPVSTGEKNAAT

SEQ ID NO: 135 - protein, 238 aa, Artificial Sequence
  ICOSL v27 ECD
DTQEKEVRAMVGSDVELSCACPEGSRFDLNDVYVYWQTSESKTVVTYHIPQHSSLENVDSRYRNRALMSPAGMLRGDFSLRLFNVTPQDEQKFHCLVLSQSLGFQEVLSVEVTLHVAANFSVPVVSAPHSPSQDELTFTCTSTNGYPRPNVYWINKTDNSLLDQALQNDTVFLNMRGLYDVVSVLRIARTPSVNIGCCIENVLLQQNLTVGSQTGNDIGERDKITENPVSTGEKNAAT

SEQ ID NO: 136 - protein, 238 aa, Artificial Sequence
  ICOSL v28 ECD
DTQEKEVRAMVGSDVELSCACPEGSRFDLNDVYVYWQTSESKTVVTYHIPQSSSLENVDSRYRNRALMSPAGMLRGDFSPRLFNVTPQDEQKFHCLVLSQSLGFQEVLSVEVTLHVAANFSVPVVSAPHSPSQDELTFTCTSINGYPRPNVYWINKTDNSLLDQALQNDTVFLNMRGLYDVVSVLRIARTPSVNIGCCIENVLLQQNLTVGSQTGNDIGERDKITENPVSTGEKNAAT

SEQ ID NO: 137 - protein, 238 aa, Artificial Sequence
  ICOSL v29 ECD
DTQEKEVRAMVGSDVELSCACPEGSRFDLNDVYVYWQTSESKTVVTYHIPQNSSLENVDSRYRNRALMSPAGMLRGDFSLRLFNVTPQDEQKFHCLVLSQSLGFQEVLSVEVTLHVAANSSVPVVSAPHSPSQDELTFTCTSINGYPRPNVHWINKTDNSLLDQALQNDTVFLNMRGLYDVVSVLRIARTPSVNIGCCIESVLLQQNLTVGSQTGNDIGERDKITENPVSTGEKNAAT

SEQ ID NO: 138 - protein, 238 aa, Artificial Sequence
  ICOSL v30 ECD
DTQEKEVRAMVGSDVELSCACPEGSRFDLNDVYVYWQTSESKTVVTYHIPQSSSLENVDSRYRNRALMSPAGMLQGDFSLRLFNVTPQDEQKFHCLVLSQSLGFQEVLSVEVTLHVAANFSVPVVSAPHSPSQDELTFTCTSINGYPRPNVYWINKTDNSLLDQALQNDTVFLNMRGLYDVVSVLRIARTPSVNIGCCIENVPLQQNLTVGSQTGNDIGERDKITENPVSTGEKNAAT

SEQ ID NO: 139 - protein, 238 aa, Artificial Sequence
  ICOSL v31 ECD
DTQEKEVRAMVGSDVELSCACPEGSRFDLNDVYVYWQTSESKTVVTYHIPQSSSLENVDSRYRNRALMSPAGMLRGDFSLRLFNVTPQDEQKFHCLVLSQSLGFQEVLSVEVTLHVAANFSVPVVSAPHSPSQDELTFTCTSINGYPRPNVYWINKTGNSLLDQALQNDTVFLNMRGLYDVVSVLRIARTPSVNIGCCIENVLLQQNLTVGSQTGNDIGERDKITENPVSTGEKNAAT

SEQ ID NO: 140 - protein, 238 aa, Artificial Sequence
  ICOSL v32 ECD
DTQEKEVRAMVGSDVELSCACPEGSRFDLNDVYVYWQTSESKTVVTYHIPQDSSLENVDSRYRNRALMSPAGMLRGDFSLRLFNVTPQDEQKFHCLVLSQSLGFQEVLSVEVTLHVAANFSVPVVSAPHSPSHDELTFTCTSINGYPRPNVYWINKTDNSLLDQALQNDTVFLNMRGLYDVVSVLRIARTPSVNIGCCIENVLLQQNLTVGSQTGNDIGERDKITENPVSTGEKNAAT

SEQ ID NO: 141 - protein, 238 aa, Artificial Sequence
  ICOSL v33 ECD
DTQEKEVRAMVGSDVELSCACPEGSRFDLNDVYVYWQTSESKTVVTYHIPQSSSLEYVDSRYRNRALMSPAGMLRGDFSLRLFNVTPQDEQKFDCFVFSRSLGFQEVLSVEVTLHVAANFSVPVVSAPHSPSQDELTFTCTSINGYPRPNVYWINKTDNSLLDQALQNDTVFLNMRGLYDVVSVLRIARTPSVNIGCCIENVLLQQNLTVGSQTGNDIGERDKITENPVSTGEKNAAT

SEQ ID NO: 142 - protein, 238 aa, Artificial Sequence
  ICOSL v34 ECD
DTQEKEVRAMVGSDVELSCACPEGSRFDLNDVYVYWQTSESKTVVTYHIPQSSSLEYVDSRYRNRALMSPAGMLRGDFSLRLFNVTPQDEQKFDCFVFSRSLEFQEVLSVEVTLHVAANSSVPVVSAPHSPSQDELTFTCTSINGYPRPNVYWINKTDNSLLDQALQNDTVFLNMRGLYDVVSVLRIARTPSVNIGCCIENVLLQQNLTVGSQTGNDIGERDKITENPVSTGEKNAAT

SEQ ID NO: 143 - protein, 117 aa, Artificial Sequence
  NKp30 v1 ECD
LWVSQPPEIRTLEGSSAFLPCSFNASQGRVAIGSVTWFRDEVVPGKEVRNGTPEFRGRLVPLAPSRFLHDHQAELHIRDVRGHDAGIYVCRVEVLGLGVGTGNGTRLVVEKEHPQLG

SEQ ID NO: 144 - protein, 117 aa, Artificial Sequence
  NKp30 v2 ECD
LWVSQPPEIRTLEGSSAFLPCSFNASQGRVAIGSVTWFRDEVVPGKEVRNGTPEFRGRLAPLASSRFLHDHQAELHIRDVRGHDASIYVCRVEVLGLGVGTGNGTRLVVEKEHPQLG

SEQ ID NO: 145 - protein, 117 aa, Artificial Sequence
  NKp30 v3 ECD
LWVSQPPEIRTLEGSSAFLPCSFNASQGRLAIGSVTWFRDEVVPGKEVRNGTPEFRGRLVPLASSRFLHDHQAELHIRDVRGHDASIYVCRVEVLGLGVGTGNGTRLVVEKEHPQLG

SEQ ID NO: 146 - protein, 117 aa, Artificial Sequence
  NKp30 v4 ECD
LWVSQPPEIRTLEGSSAFLPCSFNASQGRLAIGSVTWFRDEVVPGKEVRNGTPEFRGRLAPLAPSRFLHDHQAELHIRDVRGHDASIYVCRVEVLGLGVGTGNGTRLVVEKEHPQLG

SEQ ID NO: 147 - protein, 117 aa, Homo sapiens
  MISC_FEATURE: NKp30 v5 ECD
LWVSQPPEIRTLEGSSAFLPCSFNASQGRLAIGSVTWFRDEVVPGKEVRNGTPEFRGRLAPLASSRFLHDHQAELHIRDVRGHDAGIYVCRVEVLGLGVGTGNGTRLVVEKEHPQLG

SEQ ID NO: 148 - protein, 224 aa, Artificial Sequence
  CD86 v1 ECD
APLKIQAYFNETADLPCQFANSQNQSLSELVVFWHDQENLVLNEVYLGKEKFDSVHSKYMGRTSFDSDSWTLRLHNLQIKDKGLYQCIILHKKPTGMIRIHHMNSELSVLANFSQPEIVPISNITENVYINLTCSSIHGYPEPKKMSVLLRTKNSTIEYDGVMQKSQDNVTELYDVSISLSVSFPDVTSNMTIFCILETDKTRLLSSPFSIELEDPQPPPDHIP

SEQ ID NO: 149 - protein, 224 aa, Artificial Sequence
  CD86 v2 ECD
APLKIQAYFNETADLPCQFANSQNQSLSELVVFWHDQENLVLNEVYLGKEKFDSVHSKYMGRTSFDSDSWTLRLHNLQIKDKGLYQCIIHHKKPTGMIRIHQMNSELSVLANFSQPEIVPISNITENVYINLTCSSIHGYPEPKKMSVLLRTKNSTIEYDGVMQKSQDNVTELYDVSISLSVSFPDVTSNMTIFCILETDKTRLLSSPFSIELEDPQPPPDHIP

SEQ ID NO: 150 - protein, 224 aa, Artificial Sequence
  CD86 v3 ECD
APLKIQAYFNETADLPCQFANSQNQSLSELVVFWQDQENLVLNEVYLGKEKFDSVHSKYMGRTSFDSDSWTLRLHNLQIKDKGLYQCIILHKKPTGMIRIHQMNSELSVLANFSQPEIVPISNITENVYINLTCSSIHGYPEPKKMSVLLRTKNSTIEYDGVMQKSQDNVTELYDVSISLSVSFPDVTSNMTIFCILETDKTRLLSSPFSIELEDPQPPPDHIP

SEQ ID NO: 151 - protein, 224 aa, Artificial Sequence
  CD86 v4 ECD
APLKIQAYFNETADLPCQFANSQNQSLSELVVFWQDQENLVLNEVYLGKEKFDSVHSKYMGRTSFDSDSWTLRLHNLQIKDKGLYQCIIHHKKPTGMIRIHHMNSELSVLANFSQPEIVPISNITENVYINLTCSSIHGYPEPKKMSVLLRTKNSTIEYDGVMQKSQDNVTELYDVSISLSVSFPDVTSNMTIFCILETDKTRLLSSPFSIELEDPQPPPDHIP

SEQ ID NO: 152 - protein, 101 aa, Artificial Sequence
  CD80 WT IgV
VIHVTKEVKEVATLSCGHNVSVEELAQTRIYWQKEKKMVLTMMSGDMNIWPEYKNRTIFDITNNLSIVILALRPSDEGTYECVVLKYEKDAFKREHLAEVT

SEQ ID NO: 153 - protein, 101 aa, Artificial Sequence
  CD80 v1 IgV
VIHVTKEVKEVATLSCGHNVSVEELAQTRIYWQKEKKMVLTMMSGDMNIWPEYKNRTIFDITNNLSIVIQALRPSDEGTYECVVLKYEKDGFKREHLAEVT

SEQ ID NO: 154 - protein, 101 aa, Artificial Sequence
  CD80 v4 IgV
VIHMTKEVKEVATLSCGHNVSVEELAQTRIYWQKEKKMVLTMMSGDMNIWPEYKNRTIFDITNNLSIVIQALRPSDEGTYECVVLKYEKDGFKREHLAEVT

SEQ ID NO: 155 - protein, 101 aa, Artificial Sequence
  CD80 v6 IgV
VIHVTKEVKEVATLSCGHNLSVEELAQTRIYWQKEKKMVLTMMSGDMNIWPEYKNRTIFDITNNLSIVIQALRPSDEGTYECVVLKYEKDSFKREHLAEVT

SEQ ID NO: 156 - protein, 101 aa, Artificial Sequence
  CD80 v7 IgV
VIHVTKEVKEVATLSCGHNVSVEELAQTRIYWQKEKKMVLTMMPGDMNIWPEYKNRTIFDITNNLSIVIQALRPSDEGTYECVVLKYEKDGFKREHLAEVT

SEQ ID NO: 157 - protein, 101 aa, Artificial Sequence
  CD80 v9 IgV
VIHVTKEVKEVATLSCGHNVSVEELAQTRIYWQKEKKMVLTMMSGDMNIWPEYKNRTIFDITNNLSIVILALRPSDEGTYECVVLKYEKDGFKREHLAEVT

SEQ ID NO: 158 - protein, 101 aa, Artificial Sequence
  CD80 v10 IgV
VIHVTKEVKEVATLSCGHNVSVEELAQTRIYWQKEKKMVLTMMSGDMNIWPEYKNRTIFDITNNLSIVIRALRPSDEGTYECVVLKYEKDGFKREHLAEVT

SEQ ID NO: 159 - protein, 101 aa, Artificial Sequence
  CD80 v11 IgV
VIHVTKEVKEVATLSCGHNVSVEELAQTRIYWQKEKKMVLTMMSGDMNIWPEYKNRTIFDITNNLSIVIQALRPSDEGTYACVVLKYEKDGFKREHLAEVT

SEQ ID NO: 160 - protein, 101 aa, Artificial Sequence
  CD80 v12 IgV
VIHVTKEVKEVATLSCGHNVSVEELAQTRIYWQKEKKMVLTMMSGDMNIWPEYKNRTIFDITNNLSIVIQALRPSDEGTYECVVLKNEKDGFKREHLAEVT

SEQ ID NO: 161 - protein, 101 aa, Artificial Sequence
  CD80 v13 IgV
VIHVTKEVKEVATLSCGHNVSVEELAQSRIYWQKEKKMVLTMMSGDMNIWPEYKNRTIFDITNNLSIVIQALRPSDEGTYECVVLKYEKDGFKRKHLAEVT

SEQ ID NO: 162 - protein, 101 aa, Artificial Sequence
  CD80 v14 IgV
VIHVTKEVKEVATLSCGHNVSVEELAQTRIYWQKEKKMVLTMMSGDMNIWPEYKNRTIFDITSNLSIVIQALRPSDEGTYECVVLKYEKDGFKREHLAEVT

SEQ ID NO: 163 - protein, 101 aa, Artificial Sequence
  CD80 v15 IgV
VIHVTKEVKEVATLSCGHNVSVEELAQTRIYWQKEEKMVLTMMSGDMNIWPEYKNRTIFDITNNLSTVIQALRPSDEGTYECVVLKYEKDGFKREHLAEVT

SEQ ID NO: 164 - protein, 101 aa, Artificial Sequence
  CD80 v16 IgV
VIHVTKEVKEVATLSCGHNVSVEELAQTRIYWQKEKKMVLTMMSGDMNIWPGYKNRTIFDITNNLSIVIQALRPSDEGTYECVVLKYEKDGFKREHLAEVT

SEQ ID NO: 165 - protein, 101 aa, Artificial Sequence
  CD80 v17 IgV
VIHVTKEVKEVATLSCGHNVSVEELAQTRIYWQKEKEMVLTMMSGDMNIWPEYKNRTISDITNNLSIVIQALRPSDEGTYECVVLKYEKDGFKREHLAEVT

SEQ ID NO: 166 - protein, 101 aa, Artificial Sequence
  CD80 v19 IgV
VIHVTKEVKEVATLSCGHNVSVEELAQTRIYWQKEKKMVLTMMSGDMNIWPEYKNRTIFDITNNLSIVILALRPSDEGTYECVVLKYEEDAFKREHLAEVT

SEQ ID NO: 167 - protein, 101 aa, Artificial Sequence
  CD80 v21 IgV
VIHVTKEVKEVATLSCGHNVSVEELAQTRIYWQKEKKMVLTMMSGDMNIWPEYKNRTIFVITNNLSIVILALRPSDEGTYECVVLKYEKDGFKREHLAEVT

SEQ ID NO: 168 - protein, 101 aa, Artificial Sequence
  CD80 v22 IgV
VIHVTKEVKEVATLSCGHNVSVEELAQTRIYWQKEKKMVLTMMSGDMNIWPEYMNRTIFDITNNLSIVILALRPSDEGTYECVVLKYEKDGFKREHLAEVT

SEQ ID NO: 169 - protein, 101 aa, Artificial Sequence
  CD80 v23 IgV
VIHVTKEVKEVATLSCGHNVSVEELAQTRIYWQKEKKTVLTMMSGDMNIWPEYKNRTIFDITNNLSIVIQALRPSDGGTYECVVLKYEKDGFKREHLAEVT

SEQ ID NO: 170 - protein, 101 aa, Artificial Sequence
  CD80 v24 IgV
VIHVTKEVKEVATLSCGHNVSVEELAQTHIYWQKEKKMVLTMMSGDMNIWPGYKNRTIFDITNNLSIVIRALRPSDEGTYECVVLKYGKDGFKREHLAEVT

SEQ ID NO: 171 - protein, 101 aa, Artificial Sequence
  CD80 v25 IgV
VIHVTKEVKEVATLSCGHNVSVEELAQTRIHWQKEKKMVLGMMSGDMNIWPEYKNRTIFDITNNLSIVIQALRPSDEGTYECVVLKYEKDGFKREHLAEVT

SEQ ID NO: 172 - protein, 101 aa, Artificial Sequence
  CD80 v26 IgV
VIHVTKEVKEVATLSCGHNVSVEELAQTRIYWQKEKKMVLTMMSGDMNIWPEYKNRTIFDITNNLSIAILALRPSDEGTYECVVLKYEKDAFKREHLAEVT

SEQ ID NO: 173 - protein, 101 aa, Artificial Sequence
  CD80 v27 IgV
VIHVTKEVKEVATLSCGHNVSVEELAQTRIYWQKEKKMVLTMMSGDMNIWPEYKNRTIFDITNNLHIVILALRPSDEGTYECVVLKYEKGAFKREHLAEVT

SEQ ID NO: 174 - protein, 101 aa, Artificial Sequence
  CD80 v28 IgV
VIHVTKEVKEVATLSCGHNVSVEELAQTHIYWQKEKKMVLTMMSGDMNIWPGYKNRTIFDITNNLSIVILALRPSDEGTYECVVLKYEKDAFKREHLAEVT

SEQ ID NO: 175 - protein, 101 aa, Artificial Sequence
  CD80 v30 IgV
VIHVTKEVKEVATLSCGHNVSVEELAQTRIYWQKEKKMVLTMMSGDMNIWPEYKNRTIFDITNNLSTVIQALRPSDEGTYECVVLKYEKDGFKREHLAEVT

SEQ ID NO: 176 - protein, 101 aa, Artificial Sequence
  CD80 v32 IgV
VIHVTKEVKEVATLSCGHNVSVEELAQTRIYWQKEKKVVLDMISGDMNIGPEYKNRTIFDITNNLSIVILALRPSGEGTYECAVLKYEEDAFKREHLAEVT

SEQ ID NO: 177 - protein, 101 aa, Artificial Sequence
  CD80 v33 IgV
VIHVTKEVKEVATLSCGHNVSAEELAQTRIYWQKEKKMVLTMMSGDMNIWPEYKNRTIFDITNNLSIVIQALRPSDEGTYECVVLKYEKDAFKREHLAEVT

SEQ ID NO: 178 - protein, 101 aa, Artificial Sequence
  CD80 v34 IgV
VIHVTKEVKEVVTLFCGHNVSVEELAQTRIHWQKEKKMVLGMMSGDMNIWPEYKNRTIFDITNNLSIVILALRPSDEGTYECVVLKYEKDAFKREHLAEVT

SEQ ID NO: 179 - protein, 101 aa, Artificial Sequence
  CD80 v35 IgV
VIHVTKEVKEVATLSCGHNVSVEELAQTRIYWQKEKKMVLTMMSGDMNIWPEYKNRTIFDITNNLSFVIRALRPSDEGTYECVVLKYGKDGFKREHLAEVT

SEQ ID NO: 180 - protein, 101 aa, Artificial Sequence
  CD80 v36 IgV
VIHVTKEVKEVATLSCGHNVSVEGPAQTRIYWQKEKKMVLTMMSGDMNIWPEYKNRTIFDITNNLSIVIQALRPSDEGTYECVVLKYEKDAFKREHLAEVT

SEQ ID NO: 181 - protein, 101 aa, Artificial Sequence
  CD80 v37 IgV
VIHVTKEVKEVATLSCGHNVSVEELAQTRIYWQKEKKMVLTMMSGDMNIWPEYKNRTIFDITNNLSIVILALRPSDEGTYECVVLKYEKDGLKREHLAEVT

SEQ ID NO: 182 - protein, 101 aa, Artificial Sequence
  CD80 v38 IgV
VIHVTKEVKEVATLSCGHNVSVEELAQTDILWHKEGKIVLAMRSGDTNIWPEYKNRTIFDITNNLSIVILALRPSDEGTYVCVVRKYENDTPVLEHLAEVT

SEQ ID NO: 183 - protein, 101 aa, Artificial Sequence
  CD80 v40 IgV
VIHVTKEVKEVATLSCGHNVSVEELAQTDILWHKEGKIVLATRSGDTNIWPEYKNRTIFDITNNLSIVILALRPSDEGTYVCVVRKYENDTPVLEHLAEVT

SEQ ID NO: 184 - protein, 101 aa, Artificial Sequence
  CD80 v41 IgV
VIHVTKEVKEVATLSCGHNVSVEGLAQTDILWHKEGKIVLAMRSGDTNIWPEYKNRTILDITNNLSIVILALRPSDEGTYVCVVRKYENDTPVLERLAEVT

SEQ ID NO: 185 - protein, 101 aa, Artificial Sequence
  CD80 v43 IgV
VIHVTKEVKEVATLSCGHNVSVEELAQTVIYWQKEKKMVLTMQSGDMNIWPEYKNRTIFDITNNLSIVILALRPSDEGTYRCVVIKYERLENQGEHLAEVT

SEQ ID NO: 186 - protein, 101 aa, Artificial Sequence
  CD80 v44 IgV
VIHVTKEVKEVATLSCGHNVSVEELAQTRIYWQKEKKMVLIMMSGDMNIWPEYKNRTIFDITNNLSIVILALRPSDEGTYECVVLKYEKDGFKREHLAEVT

SEQ ID NO: 187 - protein, 101 aa, Homo sapiens
  MISC_FEATURE: CD80 v45 IgV
VIHVTKEVKEVATLSCGHNVSVEELAQTRIYWQKEKKMVLTMMSGDMNIWPEYKNRTIFDITNNLSIVILALRPSDEGTYECVVLKYERKGYRREHLAEVT

SEQ ID NO: 188 - protein, 101 aa, Artificial Sequence
  CD80 v47 IgV
VIHVTKEVKEVATLSCGHNVSVEELAQTRIYWQKEGQIVLTMMSGDMNIWPEYKNRTILDITNNLSIVILALRPSDEGTYVCVVRKYENDTPVLEHLAGVT

SEQ ID NO: 189 - protein, 101 aa, Artificial Sequence
  CD80 v48 IgV
VIHVTKEVKEVATLSCGHNVSVEELAQTRIYWQKEKKMVLTMMSGDMNIWPEYKNRTIFDITNNLSIVILALRPSDEGTYECVVLKYDRKGYRREHLAEVT

SEQ ID NO: 190 - protein, 101 aa, Artificial Sequence
  CD80 v49 IgV
VIHVTKEVKEVATLSCGHNVSVEELAQTRIYWQKEGQIVMTMMSGDMNIWPEYKNRTIFDITNNLSIVILALRPSDEGTYECVVLKYEKDAFKREHLAEVT

SEQ ID NO: 191 - protein, 101 aa, Artificial Sequence
  CD80 v50 IgV
VIHVTKEVKEVATLSCGHNVSVEELAQTRIYWQKEGKMVLTMMSGDMNIWPEYKNRTIFDITNNLSIVILALRPSDEGTYECVVLKYEKDAFKREHLAEVT

SEQ ID NO: 192 - protein, 101 aa, Artificial Sequence
  CD80 v51 IgV
VIHVTKEVKEVATLSCGHNVSVEELAQTHIHWQKEKKMVLGMMSGDMNIWPEYKNRTIFDITNNLSIVILALRPSDEGTYECVVLKNGENGFKREHLAEVT

SEQ ID NO: 193 - protein, 101 aa, Artificial Sequence
  CD80 v52 IgV
VIHVTKEVKEVTTLSCGLNVSVEELAQTRIYWQKEKKMVLTMVSGDMNIWPEYKNRTILDITNNLSIVILALRPSDKGTYECVVLKYEKDAFKREHLAEVT

SEQ ID NO: 194 - protein, 101 aa, Artificial Sequence
  CD80 v53 IgV
VIHVTKEVKEVATLSCGHNVSVEELAQTVIFWQKEGKLVLTMQSGDMNIWPEYKNRTIFDITNNLSIVILALRPSDEGTYRCIVIKYERLENQGEHLAEVT

SEQ ID NO: 195 - protein, 101 aa, Artificial Sequence
  CD80 v54 IgV
VIHVTKEVKEVATLSCGHNVSVEELAQTRIYWQKEKKMVLTMMSGDMNIWPEYKNRTIFDITNNLSIMIPAPRPSDEGTYECVVLEYEKDAFKREHLAEVT

SEQ ID NO: 196 - protein, 111 aa, Artificial Sequence
  ICOSL WT IgV
DTQEKEVRAMVGSDVELSCACPEGSRFDLNDVYVYWQTSESKTVVTYHIPQNSSLENVDSRYRNRALMSPAGMLRGDFSLRLFNVTPQDEQKFHCLVLSQSLGFQEVLSVE

SEQ ID NO: 197 - protein, 111 aa, Artificial Sequence
  ICOSL v1 IgV
DTQEKEVRAMVGSDVELSCACPEGSRFDLNDVYVYWQTSESKTVVTYHIPQSSSLENVDSRYRNRALMSPAGMLRGDFSLRLFNVTPQDEQKFHCLVLSQSLGFQEVLSVE

SEQ ID NO: 198 - protein, 111 aa, Artificial Sequence
  ICOSL v2 IgV
DTQEKEVRAMVGSDVELSCACPEGSRFDLNDVYVYWQTSESKTVVTYHIPQHSSLENVDSRYRNRALMSPAGMLRGDFSLRLFNVTPQDEQKFHCLVLSQSLGFQEVLSVE

SEQ ID NO: 199 - protein, 111 aa, Artificial Sequence
  ICOSL v3 IgV
DTQEKEVRAMVGSDVELSCACPEGSRFDLNDVYVYWQTSESKTVVTYHIPQDSSLENVDSRYRNRALMSPAGMLRGDFSLRLFNVTPQDEQKFHCLVLSQSLGFQEVLSVE

SEQ ID NO: 200 - protein, 111 aa, Artificial Sequence
  ICOSL v4 IgV
DTQEKEVRAMVGSDVELSCACPEGSRFDLNDVYVYWQTSESKTVVTYHIPQYSSLEYVDSRYRNRALMSPAGMLRGDFSLRLFNVTPQDEQKFHCLVLSQSLGFQEVLSVE

SEQ ID NO: 201 - protein, 111 aa, Artificial Sequence
  ICOSL v5 IgV
DTQEKEVRAMVGSDVELSCACPEGSRFDLNDVYVYWQTSESKTVVTYHIPQHSSLEYVDSRYRNRALMSPAGMLRGDFSLRLFNVTPQDEQKFHCLVLSPSLGFQEVLSVE

SEQ ID NO: 202 - protein, 111 aa, Artificial Sequence
  ICOSL v10 IgV
DTQEKEVRAMVGSDVELSCACPEGSRFDLNDVYVYWQTSESKTVVTYHIPQHSSLENVDSRYRNRALMSPAGMLRGDFSLRLFNVTPQDEQRFHCLVLSQSLGFQEVLSVE

SEQ ID NO: 203 - protein, 111 aa, Artificial Sequence
  ICOSL v11 IgV
DTQEKEVRAMVGSDVELSCACPEGSRFDLNDVYVYWQTSESKTVVTYHIPQHSSLENVDSRYRNRALMSPAGMLRGDFSLRLFNVTPQDEQKFHCLVLGQSLGFQEVLSVE

SEQ ID NO: 204 - protein, 111 aa, Homo sapiens
  MISC_FEATURE: ICOSL v12 IgV
DTQEKEVRAMVGSDVELSCACPEGSRFDLNDVYVYWQTSESKTVVTYHIPQYSSLENVDSRYRNRALMSPAGMLRGDFSLRLFNVTPQDEQKFHCLVLSQSLGFQEVLSVE

SEQ ID NO: 205 - protein, 111 aa, Artificial Sequence
  ICOSL v13 IgV
DTQEKEVRAMVGSDVELSCACPEGSRFDLNDVYVYWQTSESKTVVTYHIPQNSSLEYVDSRYRNRALMSPAGMLRGDFSLRLFNVTPQDEQKFHCLVLSQSLGFQEVLSVE

SEQ ID NO: 206 - protein, 111 aa, Artificial Sequence
  ICOSL v14 IgV
DTQEKEVRAMVGSDVELSCACPEGSRFDLNDVYVYWQTSESKTVVTYHIPQNSSLEYVDSRYRNRALMSPAGMLRGDFSLRLFNVTPQDEQKFHCLVLSPSLGFQEVLSVE

SEQ ID NO: 207 - protein, 111 aa, Artificial Sequence
  ICOSL v22 IgV
DTQEKEVRAMVGSDVELSCACPEGSRFDLNDVYVYWQTSESKTVVTYHIPQNSALENVDSRYRNRALMSPAGMLRGDFSLRLFNVTPQDEQKFHCLVLSQSLGFQEVLSVE

SEQ ID NO: 208 - protein, 111 aa, Artificial Sequence
  ICOSL v23 IgV
DTQEKEVRAMVGSDVELSCACPEGSRFDLNDVYVYWQTSESKTVVTYHIPQDSPLENVDSRYRNRALMSPAGMLRGDFSLRLFNVTPQDEQKFHCLVLSQSLGFQEVLSVE

SEQ ID NO: 209 - protein, 111 aa, Artificial Sequence
  ICOSL v24 IgV
DTQEKEVRAMVGSDVELSCACPEGSRFDLNDVYVYWQTSESKTVVTYHIPQKSSLENVDSRYRNRALMSPAGMLRGDFSLRLFNVTPQDEQKFHCLVLSQSLGFQEVLSVE

SEQ ID NO: 210 - protein, 111 aa, Homo sapiens
  MISC_FEATURE: ICOSL v28 IgV
DTQEKEVRAMVGSDVELSCACPEGSRFDLNDVYVYWQTSESKTVVTYHIPQSSSLENVDSRYRNRALMSPAGMLRGDFSPRLFNVTPQDEQKFHCLVLSQSLGFQEVLSVE

SEQ ID NO: 211 - protein, 111 aa, Artificial Sequence
  ICOSL v30 IgV
DTQEKEVRAMVGSDVELSCACPEGSRFDLNDVYVYWQTSESKTVVTYHIPQSSSLENVDSRYRNRALMSPAGMLQGDFSLRLFNVTPQDEQKFHCLVLSQSLGFQEVLSVE

SEQ ID NO: 212 - protein, 111 aa, Artificial Sequence
  ICOSL v33 IgV
DTQEKEVRAMVGSDVELSCACPEGSRFDLNDVYVYWQTSESKTVVTYHIPQSSSLEYVDSRYRNRALMSPAGMLRGDFSLRLFNVTPQDEQKFDCFVFSRSLGFQEVLSVE

SEQ ID NO: 213 - protein, 111 aa, Artificial Sequence
  ICOSL v34 IgV
DTQEKEVRAMVGSDVELSCACPEGSRFDLNDVYVYWQTSESKTVVTYHIPQSSSLEYVDSRYRNRALMSPAGMLRGDFSLRLFNVTPQDEQKFDCFVFSRSLEFQEVLSVE

SEQ ID NO: 214 - protein, 108 aa, Artificial Sequence
  NKp30 WT IgC-like
LWVSQPPEIRTLEGSSAFLPCSFNASQGRLAIGSVTWFRDEVVPGKEVRNGTPEFRGRLAPLASSRFLHDHQAELHIRDVRGHDASIYVCRVEVLGLGVGTGNGTRLV

SEQ ID NO: 215 - protein, 108 aa, Homo sapiens
  MISC_FEATURE: NKp30 v1 IgC-like
LWVSQPPEIRTLEGSSAFLPCSFNASQGRVAIGSVTWFRDEVVPGKEVRNGTPEFRGRLVPLAPSRFLHDHQAELHIRDVRGHDAGIYVCRVEVLGLGVGTGNGTRLV

SEQ ID NO: 216 - protein, 108 aa, Homo sapiens
  MISC_FEATURE: NKp30 v2 IgC-like
LWVSQPPEIRTLEGSSAFLPCSFNASQGRVAIGSVTWFRDEVVPGKEVRNGTPEFRGRLAPLASSRFLHDHQAELHIRDVRGHDASIYVCRVEVLGLGVGTGNGTRLV

SEQ ID NO: 217 - protein, 108 aa, Homo sapiens
  MISC_FEATURE: NKp30 v3 IgC-like
LWVSQPPEIRTLEGSSAFLPCSFNASQGRLAIGSVTWFRDEVVPGKEVRNGTPEFRGRLVPLASSRFLHDHQAELHIRDVRGHDASIYVCRVEVLGLGVGTGNGTRLV

SEQ ID NO: 218 - protein, 108 aa, Artificial Sequence
  NKp30 v4 IgC-like
LWVSQPPEIRTLEGSSAFLPCSFNASQGRLAIGSVTWFRDEVVPGKEVRNGTPEFRGRLAPLAPSRFLHDHQAELHIRDVRGHDASIYVCRVEVLGLGVGTGNGTRLV

SEQ ID NO: 219 - protein, 108 aa, Artificial Sequence
  NKp30 v5 IgC-like
LWVSQPPEIRTLEGSSAFLPCSFNASQGRLAIGSVTWFRDEVVPGKEVRNGTPEFRGRLAPLASSRFLHDHQAELHIRDVRGHDAGIYVCRVEVLGLGVGTGNGTRLV

SEQ ID NO: 220 - protein, 99 aa, Artificial Sequence
  CD86 WT IgV
NETADLPCQFANSQNQSLSELVVFWQDQENLVLNEVYLGKEKFDSVHSKYMGRTSFDSDSWTLRLHNLQIKDKGLYQCIIHHKKPTGMIRIHQMNSELS

SEQ ID NO: 221 - protein, 99 aa, Homo sapiens
  MISC_FEATURE: CD86 v1 IgV
NETADLPCQFANSQNQSLSELVVFWHDQENLVLNEVYLGKEKFDSVHSKYMGRTSFDSDSWTLRLHNLQIKDKGLYQCIILHKKPTGMIRIHHMNSELS

SEQ ID NO: 222 - protein, 99 aa, Homo sapiens
  MISC_FEATURE: CD86 v2 IgV
NETADLPCQFANSQNQSLSELVVFWHDQENLVLNEVYLGKEKFDSVHSKYMGRTSFDSDSWTLRLHNLQIKDKGLYQCIIHHKKPTGMIRIHQMNSELS

SEQ ID NO: 223 - protein, 99 aa, Homo sapiens
  MISC_FEATURE: CD86 v3 IgV
NETADLPCQFANSQNQSLSELVVFWQDQENLVLNEVYLGKEKFDSVHSKYMGRTSFDSDSWTLRLHNLQIKDKGLYQCIILHKKPTGMIRIHQMNSELS

SEQ ID NO: 224 - protein, 99 aa, Homo sapiens
  MISC_FEATURE: CD86 v4 IgV
NETADLPCQFANSQNQSLSELVVFWQDQENLVLNEVYLGKEKFDSVHSKYMGRTSFDSDSWTLRLHNLQIKDKGLYQCIIHHKKPTGMIRIHHMNSELS

SEQ ID NO: 225 - protein, 19 aa, Homo sapiens
  MISC_FEATURE: VH signal peptide
MGSTAILALLLAVLQGVSA

SEQ ID NO: 226 - protein, 232 aa, Homo sapiens
  MISC_FEATURE: IgG1 Fc
EPKSCDKTHTCPPCPAPELLGGPSVFLFPPKPKDTLMISRTPEVTCVVVDVSHEDPEVKFNWYVDGVEVHNAKTKPREEQYNSTYRVVSVLTVLHQDWLNGKEYKCKVSNKALPAPIEKTISKAKGQPREPQVYTLPPSREEMTKNQVSLTCLVKGFYPSDIAVEWESNGQPENNYKTTPPVLDSDGSFFLYSKLTVDKSRWQQGNVFSCSVMHEALHNHYTQKSLSLSPGK

SEQ ID NO: 227 - protein, 235 aa, Homo sapiens
  MISC_FEATURE: IgG2 Fc
TKVDKTVERKCCVECPPCPAPPVAGPSVFLFPPKPKDTLMISRTPEVTCVVVDVSHEDPEVQFNWYVDGVEVHNAKTKPREEQFNSTFRVVSVLTVVHQDWLNGKEYKCKVSNKGLPAPIEKTISKTKGQPREPQVYTLPPSREEMTKNQVSLTCLVKGFYPSDIAVEWESNGQPENNYKTTPPMLDSDGSFFLYSKLTVDKSRWQQGNVFSCSVMHEALHNHYTQKSLSLSPGK

SEQ ID NO: 228 - protein, 15 aa, Homo sapiens
  MISC_FEATURE: IgV-IgV linker
GGGGSGGGGSGGGGS

SEQ ID NO: 229 - protein, 10 aa, Artificial Sequence
  IgV-Fc linker 1
GGGGSGGGGS

SEQ ID NO: 230 - protein, 13 aa, Artificial Sequence
  IgV-Fc linker 2
GGGGSGGGGSAAA

SEQ ID NO: 231 - protein, 15 aa, Artificial Sequence
  CD80 WT linker 1
KADFPTPSISDFEIP

SEQ ID NO: 232 - protein, 10 aa, Artificial Sequence
  CD80 WT linker 2
TTKQEHFPDN

SEQ ID NO: 233 - protein, 11 aa, Artificial Sequence
  ICOSL WT linker 1
VTLHVAANFSV

SEQ ID NO: 234 - protein, 29 aa, Artificial Sequence
  ICOSL WT linker 2
VGSQTGNDIGERDKITENPVSTGEKNAAT

SEQ ID NO: 235 - protein, 9 aa, Artificial Sequence
  NKp30 WT linker 1
VEKEHPQLG

SEQ ID NO: 236 - protein, 9 aa, Artificial Sequence
  CD86 WT linker 1
APLKIQAYF

SEQ ID NO: 237 - protein, 18 aa, Artificial Sequence
  CD86 WT linker 2
VLANFSQPEIVPISNITE

SEQ ID NO: 238 - protein, 22 aa, Artificial Sequence
  CD86 WT linker 3
RLLSSPFSIELEDPQPPPDHIP

SEQ ID NO: 239 - protein, 238 aa, Artificial Sequence
  ICOSL v35 ECD
DTQEKEVRAMVGSDVELSCACPEGSRFDLNDVYVYWQTSESKTVVTYHIPQSSSLENVDSRYRNRALMSPAGMLRGDFSLRLFNVTPQDEQKFHCLVLSQSLEFQEVLSVEVTLHVAANFSVPVVSAPHSPSQDELTFTCTSINGYPRPNVYWINKTDNSLLDQALQNDTVFLNMRGLYDVVSVLRIARTPSVNIGCCIENVLLQQNLTVGSQTGNDIGERDKITENPVSTGEKNAAT

SEQ ID NO: 240 - protein, 111 aa, Artificial Sequence
  ICOSL v35 IgV
DTQEKEVRAMVGSDVELSCACPEGSRFDLNDVYVYWQTSESKTVVTYHIPQSSSLENVDSRYRNRALMSPAGMLRGDFSLRLFNVTPQDEQKFHCLVLSQSLEFQEVLSVE

SEQ ID NO: 241 - protein, 116 aa, Homo sapiens
  MISC_FEATURE: CD155 IgV
PGTGDVVVQAPTQVPGFLGDSVTLPCYLQVPNMEVTHVSQLTWARHGESGSMAVFHQTQGPSYSESKRLEFVAARLGAELRNASLRMFGLRVEDEGNYTCLFVTFPQGSRSVDIWL

SEQ ID NO: 242 - protein, 323 aa, Artificial Sequence
  CD155 v1 ECD
WPPPGTGDVVVQAPTQVSGFLGDSVTLPCYLQVPNMEVTHVSQLTWARHGESGSMAVFHQTQGSSYSESKRLEFVAARLGAELRNASLRMSGLRVEDEGNYTCLFVTFPQGSRSVDIWLRVLAKPQNTAEVQKVQLTGEPVPMARCVSTGGRPPAQITWHSDLGGMPNTSQVPGFLSGTVTVTSLWILVPSSQVDGKNVTCKVEHESFEKPQLLTVNLTVYYPPEVSISGYDNNWYLGQNEATLTCDARSNPEPTGYNWSTTMGPLPPFAVAQGAQLLIRPVDKPINTTLICNVTNALGARQAELTVQVKEGPPSEHSGISRN

SEQ ID NO: 243 - protein, 323 aa, Artificial Sequence
  CD155 v2 ECD
WPPPGTGDVVVQAPTQVSGFLGDSVTLPCYLQVPNMEVTHVSQLTWARHGESGSMAVFHQTQGPSYSESKRLEFVAARLGAELRNASLRMSGLRVEDEGNYTCPFVTFPQGSRSVDIWLRVLAKPQNTAEVQKVQLTGEPVPMARCVSTGGRPPAQITWHSDLGGMPNTSQVPGFLSGTVTVTSLWILVPSSQVDGKNVTCKVEHESFEKPQLLTVNLTVYYPPEVSISGYDNNWYLGQNEATLTCDARSNPEPTGYNWSTTMGPLPPFAVAQGAQLLIRPVDKPINTTLICNVTNALGARQAELTVQVKEGPPSEHSGISRN

SEQ ID NO: 244 - protein, 323 aa, Artificial Sequence
  CD155 v3 ECD
WPPPGTGDVVVQAPTQVPGFLGDSVTLPCYLQVPNMEVTHVSQPTWARHGESGSMAVFHQTQGPSYSESKRLEFVAARLGAELRNASLRMFGLRVEDEGNYTCLFVTFPQGSRSVDIWLRVLAKPQNTAEVQKVQLTGEPVPMARCVSTGGRPPAQITWHSDLGGMPNTSQVPGFLSGTVTVTSLWILVPSSQVDGKNVTCKVEHESFEKPQLLTVNLTVYYPPEVSISGYDNNWYLGQNEATLTCDARSNPEPTGYNWSTTMGPLPPFAVAQGAQLLIRPVDKPINTTLICNVTNALGARQAELTVQVKEGPPSEHSGISRN

SEQ ID NO: 245 - protein, 323 aa, Artificial Sequence
  CD155 v4 ECD
WPPPGTGDVVVQAPTQVPGFLGDSVTLPCYLQVPNMEVTHVSQLTWARHGESGSMVVFHQTQGPSYSESKRLEFVAARLGAELRNASLRMFGLRVEDEGNYTCLFVTFPQGSRSVDIWLRVLAKPQNTAEVQKVQLTGEPVPMARCVSTGGRPPAQITWHSDLGGMPNTSQVPGFLSGTVTVTSLWILVPSSQVDGKNVTCKVEHESFEKPQLLTVNLTVYYPPEVSISGYDNNWYLGQNEATLTCDARSNPEPTGYNWSTTMGPLPPFAVAQGAQLLIRPVDKPINTTLICNVTNALGARQAELTVQVKEGPPSEHSGISRN

SEQ ID NO: 246 - protein, 323 aa, Artificial Sequence
  CD155 v5 ECD
WPPPGTGDVVVQAPTQVLGFLGDSVTLPCYLQVPNMEVTHVSQLTWARHGESGSMAVFHQTQGPSYSESKRLEFVAARVGAELRNASLRMSGLRVEDEGNYTCLFVTFPQGSRSVDIWLRVLAKPQNTAEVQKVQLTGEPVPMARCVSTGGRPPAQITWHSDLGGMPNTSQVPGFLSGTVTVTSLWILVPSSQVDGKNVTCKVEHESFEKPQLLTVNLTVYYPPEVSISGYDNNWYLGQNEATLTCDARSNPEPTGYNWSTTMGPLPPFAVAQGAQLLIRPVDKPINTTLICNVTNALGARQAELTVQVKEGPPSEHSGISRN

SEQ ID NO: 247 - protein, 323 aa, Artificial Sequence
  CD155 v6 ECD
WPPPGTGDVVVQAPTQVSGFLGDSVTLPCYLQVPNMEVTHVSQLTWARHGESGSMAVFHQTQGPSYSESKRLEFVAARLGAELRNASLRMSGLRVEDEGNYTCLFVTFPQGSRSVDIWLRVLAKPQNTAEVQKVQLTGEPVPMARCVSTGGRPPAQITWHSDLGGMPNTSQVPGFLSGTVTVTSLWILVPSSQVDGKNVTCKVEHESFEKPQLLTVNLTVYYPPEVSISGYDNNWYLGQNEATLTCDARSNPEPTGYNWSTTMGPLPPFAVAQGAQLLIRPVDKPINTTLICNVTNALGARQAELTVQVKEGPPSEHSGISRN

SEQ ID NO: 248 - protein, 323 aa, Artificial Sequence
  CD155 v7 ECD
WPPPGTGDVVVQAPTQVTGFLGDSVTLPCYLQVPNMEVTHVSQLTWARHGESGSMAVFHQTQGPSYSESKRLEFVAARLGAELRNASLRMSGLRVEDEGNYTCLFVTFPQGSRSVDIWLRVLAKPQNTAEVQKVQLTGEPVPMARCVSTGGRPPAQITWHSDLGGMPNTSQVPGFLSGTVTVTSLWILVPSSQVDGKNVTCKVEHESFEKPQLLTVNLTVYYPPEVSISGYDNNWYLGQNEATLTCDARSNPEPTGYNWSTTMGPLPPFAVAQGAQLLIRPVDKPINTTLICNVTNALGARQAELTVQVKEGPPSEHSGISRN

SEQ ID NO: 249 - protein, 323 aa, Artificial Sequence
  CD155 v8 ECD
WPPPGTGDVVVQAPTQVTGFLGDSVTLPCYLQVPNMEVTHVPQLTWARHGESGSMAVFHQTQGPSYSESKRLEFVAARLGAELRNASLRMSGLRVEDEGNYTCLFVTFPQGSRSVDIWLRVLAKPQNTAEVQKVQLTGEPVPMARCVSTGGRPPAQITWHSDLGGMPNTSQVPGFLSGTVTVTSLWILVPSSQVDGKNVTCKVEHESFEKPQLLTVNLTVYYPPEVSISGYDNNWYLGQNEATLTCDARSNPEPTGYNWSTTMGPLPPFAVAQGAQLLIRPVDKPINTTLICNVTNALGARQAELTVQVKEGPPSEHSGISRN

SEQ ID NO: 250 - protein, 323 aa, Artificial Sequence
  CD155 v9 ECD
WPPPGTEDVVVQAPTQVTGFLGDSVTLPCCLQVPNMEVTHVSQLTWARHGESGSMAVFHQTQGPSYSESKRLEFVAARLGAELRNASLRMSGLRVEDEGNYTCLFVTFPQGSRSVDIWLRVLAKPQNTAEVQKVQLTGEPVPMARCVSTGGRPPAQITWHSDLGGMPNTSQVPGFLSGTVTVTSLWILVPSSQVDGKNVTCKVEHESFEKPQLLTVNLTVYYPPEVSISGYDNNWYLGQNEATLTCDARSNPEPTGYNWSTTMGPLPPFAVAQGAQLLIRPVDKPINTTLICNVTNALGARQAELTVQVKEGPPSEHSGISRN

SEQ ID NO: 251 - protein, 323 aa, Artificial Sequence
  CD155 v10 ECD
WPPPGTGDVVVQAPTQVTGFLGDSVTLPCYLQVPNMEVTHVSQLTWARHGESGSMAVFHQTQGPSYSESKRLEFVAARLGAELRNASLRMSGLRVEDEGNYTCLFVTFPQDSRSVDIWLRVLAKPQNTAEVQKVQLTGEPVPMARCVSTGGRPPAQITWHSDLGGMPNTSQVPGFLSGTVTVTSLWILVPSSQVDGKNVTCKVEHESFEKPQLLTVNLTVYYPPEVSISGYDNNWYLGQNEATLTCDARSNPEPTGYNWSTTMGPLPPFAVAQGAQLLIRPVDKPINTTLICNVTNALGARQAELTVQVKEGPPSEHSGISRN

SEQ ID NO: 252 - protein, 323 aa, Artificial Sequence
  CD155 v11 ECD
WPPPGTGDVVVQAPTQVSGFLGDSVTLPCYLQVPNMEVTHVSQLTWARHGESGSMAVFHQTQGPSYSESKRLEFVAARLGAELRNASLRMPGLRVEDEGNYTCLFVTFPQGSRSVDIWLRVLAKPQNTAEVQKVQLTGEPVPMARCVSTGGRPPAQITWHSDLGGMPNTSQVPGFLSGTVTVTSLWILVPSSQVDGKNVTCKVEHESFEKPQLLTVNLTVYYPPEVSISGYDNNWYLGQNEATLTCDARSNPEPTGYNWSTTMGPLPPFAVAQGAQLLIRPVDKPINTTLICNVTNALGARQAELTVQVKEGPPSEHSGISRN

SEQ ID NO: 253 - protein, 323 aa, Artificial Sequence
  CD155 v12 ECD
WPPPGTGDVVVQAPTQVTGFLGDSVTLPCYLQVPNMEVTHVSQLTWARHGESGSMAVFHQTQGPSYSESKRLEFVAARLGAELRNASLRMSGLRVEDEGNYTCLFVTLPQGSRSVDIWLRVLAKPQNTAEVQKVQLTGEPVPMARCVSTGGRPPAQITWHSDLGGMPNTSQVPGFLSGTVTVTSLWILVPSSQVDGKNVTCKVEHESFEKPQLLTVNLTVYYPPEVSISGYDNNWYLGQNEATLTCDARSNPEPTGYNWSTTMGPLPPFAVAQGAQLLIRPVDKPINTTLICNVTNALGARQAELTVQVKEGPPSEHSGISRN

SEQ ID NO: 254 - protein, 323 aa, Artificial Sequence; identical to SEQ ID NO: 247
  CD155 v13 ECD

SEQ ID NO: 255 - protein, 323 aa, Artificial Sequence
  CD155 v14 ECD
WPPPGTGDVVVQAPTQVTGFLGDSVTLPCYLQVPNMEVTHVSQLAWARHGESGSMAVFHQTQGPSYSESKRLEFVAARLGAELRNASLRMSGLRVEDEGNYTCLFVTFPQGSRSVDIWLRVLAKPQNTAEVQKVQLTGEPVPMARCVSTGGRPPAQITWHSDLGGMPNTSQVPGFLSGTVTVTSLWILVPSSQVDGKNVTCKVEHESFEKPQLLTVNLTVYYPPEVSISGYDNNWYLGQNEATLTCDARSNPEPTGYNWSTTMGPLPPFAVAQGAQLLIRPVDKPINTTLICNVTNALGARQAELTVQVKEGPPSEHSGISRN

SEQ ID NO: 256 - protein, 323 aa, Artificial Sequence
  CD155 v15 ECD
WPPPGTGDVVVQAPTQVTGFLGDSVTLPCYLQVPNMEVTHVSQLTWARHGESGSMAVFHQTQGPSYSESKRLEFVAARLGAELRNASLRMSGLHVEDEGNYTCLFVTFPQGSRSVDIWLRVLAKPQNTAEVQKVQLTGEPVPMARCVSTGGRPPAQITWHSDLGGMPNTSQVPGFLSGTVTVTSLWILVPSSQVDGKNVTCKVEHESFEKPQLLTVNLTVYYPPEVSISGYDNNWYLGQNEATLTCDARSNPEPTGYNWSTTMGPLPPFAVAQGAQLLIRPVDKPINTTLICNVTNALGARQAELTVQVKEGPPSEHSGISRN

SEQ ID NO: 257 - protein, 323 aa, Artificial Sequence
  CD155 v16 ECD
WPPPGTGDVVVQAPTQVSGFLGDSVTLPCCLQVPNMEVTHVSQLTWARHGESGSMAVFHQTQGPSYSESKRLEFVAARLGAELRNASLRMSGLRVEDEGNYTCLFVTFPQGSRSVDIWLRVLAKPQNTAEVQKVQLTGEPVPMARCVSTGGRPPAQITWHSDLGGMPNTSQVPGFLSGTVTVTSLWILVPSSQVDGKNVTCKVEHESFEKPQLLTVNLTVYYPPEVSISGYDNNWYLGQNEATLTCDARSNPEPTGYNWSTTMGPLPPFAVAQGAQLLIRPVDKPINTTLICNVTNALGARQAELTVQVKEGPPSEHSGISRN

SEQ ID NO: 258 - protein, 323 aa, Artificial Sequence
  CD155 v17 ECD
WPPPGTGDVVVQAPTQVPGFLGDSVTLPCYLQVPNMEVTHVSQLTWARHGESGSMAVFHQTQGPSYSESKRLEFVAARLGVEPRNASLRMFGLRVEDEGNYTCLFVTFPQGSRSVDIWLRVLAKPQNTAEVQKVQLTGEPVPMARCVSTGGRPPAQITWHSDLGGMPNTSQVPGFLSGTVTVTSLWILVPSSQVDGKNVTCKVEHESFEKPQLLTVNLTVYYPPEVSISGYDNNWYLGQNEATLTCDARSNPEPTGYNWSTTMGPLPPFAVAQGAQLLIRPVDKPINTTLICNVTNALGARQAELTVQVKEGPPSEHSGISRN

SEQ ID NO: 259 - protein, 323 aa, Artificial Sequence
  CD155 v18 ECD
WPPPGTGDVVVQAPTQVPGFLGDSVTLPCYLQVPNMEVTHVSQLTWARHGESGSMAVFHQTQGPSYSESKRLEFVAARLGAELRNASPRMFGLRVEDEGNYTCLFVTFPQGSRSVDIWLRVLAKPQNTAEVQKVQLTGEPVPMARCVSTGGRPPAQITWHSDLGGMPNTSQVPGFLSGTVTVTSLWILVPSSQVDGKNVTCKVEHESFEKPQLLTVNLTVYYPPEVSISGYDNNWYLGQNEATLTCDARSNPEPTGYNWSTTMGPLPPFAVAQGAQLLIRPVDKPINTTLICNVTNALGARQAELTVQVKEGPPSEHSGISRN

SEQ ID NO: 260 - protein, 323 aa, Artificial Sequence
  CD155 v19 ECD
WPPPGTGDVVVQAPTQVPGFLGDSVTLPCYLQVPNMEVTHVSQLTWARHGESGSMAVFHQTQGPSYSESKRLEFVAARLGAELRNASLRMFGLHVEDEGNYTCLFVTFPQGSRSVDIWLRVLAKPQNTAEVQKVQLTGEPVPMARCVSTGGRPPAQITWHSDLGGMPNTSQVPGFLSGTVTVTSLWILVPSSQVDGKNVTCKVEHESFEKPQLLTVNLTVYYPPEVSISGYDNNWYLGQNEATLTCDARSNPEPTGYNWSTTMGPLPPFAVAQGAQLLIRPVDKPINTTLICNVTNALGARQAELTVQVKEGPPSEHSGISRN

SEQ ID NO: 261 - protein, 323 aa, Artificial Sequence
  CD155 v20 ECD
WPPPGTGDVVVQEPTQVSGFLGDSVTLPCYLQVPNMEVTHVSQLTWARHGESGSMVVFHQTQGPSYSESKRLEFVAARLGAELRNASLRMSGLRVEDEGNYTCLFVTFPQGSRSVDIWLRVLAKPQNTAEVQKVQLTGEPVPMARCVSTGGRPPAQITWHSDLGGMPNTSQVPGFLSGTVTVTSLWILVPSSQVDGKNVTCKVEHESFEKPQLLTVNLTVYYPPEVSISGYDNNWYLGQNEATLTCDARSNPEPTGYNWSTTMGPLPPFAVAQGAQLLIRPVDKPINTTLICNVTNALGARQAELTVQVKEGPPSEHSGISRN

SEQ ID NO: 262 - protein, 323 aa, Artificial Sequence
  CD155 v21 ECD
WPPPGTGDVVVQAPTQVTGFLGDSVTLPCYLQVPNMEVTHVSQLTWARHGESGSMAVFHQTQGPSYSESKRLEFVAARLGAELRNASLRMSGLRVEDEGNYTCLFVTFPQGSRSADIWLRVLAKPQNTAEVQKVQLTGEPVPMARCVSTGGRPPAQITWHSDLGGMPNTSQVPGFLSGTVTVTSLWILVPSSQVDGKNVTCKVEHESFEKPQLLTVNLTVYYPPEVSISGYDNNWYLGQNEATLTCDARSNPEPTGYNWSTTMGPLPPFAVAQGAQLLIRPVDKPINTTLICNVTNALGARQAELTVQVKEGPPSEHSGISRN

SEQ ID NO: 263 - protein, 323 aa, Artificial Sequence
  CD155 v22 ECD
WPPPGTGDVVVQAPTQVTGFLGDSVTLPCYLQVPNMEVTHVSQLTWARHGESGSMAVFHKTQGPSYSESKRLEFVAARLGAELRNASLRMFGLRVEDEGNYTCLFVTFPQGSRSVDIWLRVLAKPQNTAEVQKVQLTGEPVPMARCVSTGGRPPAQITWHSDLGGMPNTSQVPGFLSGTVTVTSLWILVPSSQVDGKNVTCKVEHESFEKPQLLTVNLTVYYPPEVSISGYDNNWYLGQNEATLTCDARSNPEPTGYNWSTTMGPLPPFAVAQGAQLLIRPVDKPINTTLICNVTNALGARQAELTVQVKEGPPSEHSGISRN

SEQ ID NO: 264 - protein, 116 aa, Artificial Sequence
  CD155 v1 IgV
PGTGDVVVQAPTQVSGFLGDSVTLPCYLQVPNMEVTHVSQLTWARHGESGSMAVFHQTQGSSYSESKRLEFVAARLGAELRNASLRMSGLRVEDEGNYTCLFVTFPQGSRSVDIWL

SEQ ID NO: 265 - protein, 116 aa, Artificial Sequence
  CD155 v2 IgV
PGTGDVVVQAPTQVSGFLGDSVTLPCYLQVPNMEVTHVSQLTWARHGESGSMAVFHQTQGPSYSESKRLEFVAARLGAELRNASLRMSGLRVEDEGNYTCPFVTFPQGSRSVDIWL

SEQ ID NO: 266 - protein, 116 aa, Artificial Sequence
  CD155 v3 IgV
PGTGDVVVQAPTQVPGFLGDSVTLPCYLQVPNMEVTHVSQPTWARHGESGSMAVFHQTQGPSYSESKRLEFVAARLGAELRNASLRMFGLRVEDEGNYTCLFVTFPQGSRSVDIWL

SEQ ID NO: 267 - protein, 116 aa, Artificial Sequence
  CD155 v4 IgV
PGTGDVVVQAPTQVPGFLGDSVTLPCYLQVPNMEVTHVSQLTWARHGESGSMVVFHQTQGPSYSESKRLEFVAARLGAELRNASLRMFGLRVEDEGNYTCLFVTFPQGSRSVDIWL

SEQ ID NO: 268 - protein, 116 aa, Artificial Sequence
  CD155 v5 IgV
PGTGDVVVQAPTQVLGFLGDSVTLPCYLQVPNMEVTHVSQLTWARHGESGSMAVFHQTQGPSYSESKRLEFVAARVGAELRNASLRMSGLRVEDEGNYTCLFVTFPQGSRSVDIWL

SEQ ID NO: 269 - protein, 116 aa, Artificial Sequence
  CD155 v6 IgV
PGTGDVVVQAPTQVSGFLGDSVTLPCYLQVPNMEVTHVSQLTWARHGESGSMAVFHQTQGPSYSESKRLEFVAARLGAELRNASLRMSGLRVEDEGNYTCLFVTFPQGSRSVDIWL

SEQ ID NO: 270 - protein, 116 aa, Artificial Sequence
  CD155 v7 IgV
PGTGDVVVQAPTQVTGFLGDSVTLPCYLQVPNMEVTHVSQLTWARHGESGSMAVFHQTQGPSYSESKRLEFVAARLGAELRNASLRMSGLRVEDEGNYTCLFVTFPQGSRSVDIWL

SEQ ID NO: 271 - protein, 116 aa, Artificial Sequence
  CD155 v8 IgV
PGTGDVVVQAPTQVTGFLGDSVTLPCYLQVPNMEVTHVPQLTWARHGESGSMAVFHQTQGPSYSESKRLEFVAARLGAELRNASLRMSGLRVEDEGNYTCLFVTFPQGSRSVDIWL

SEQ ID NO: 272 - protein, 116 aa, Artificial Sequence
  CD155 v9 IgV
PGTEDVVVQAPTQVTGFLGDSVTLPCCLQVPNMEVTHVSQLTWARHGESGSMAVFHQTQGPSYSESKRLEFVAARLGAELRNASLRMSGLRVEDEGNYTCLFVTFPQGSRSVDIWL

SEQ ID NO: 273 - protein, 116 aa, Artificial Sequence
  CD155 v10 IgV
PGTGDVVVQAPTQVTGFLGDSVTLPCYLQVPNMEVTHVSQLTWARHGESGSMAVFHQTQGPSYSESKRLEFVAARLGAELRNASLRMSGLRVEDEGNYTCLFVTFPQDSRSVDIWL

SEQ ID NO: 274 - protein, 116 aa, Artificial Sequence
  CD155 v11 IgV
PGTGDVVVQAPTQVSGFLGDSVTLPCYLQVPNMEVTHVSQLTWARHGESGSMAVFHQTQGPSYSESKRLEFVAARLGAELRNASLRMPGLRVEDEGNYTCLFVTFPQGSRSVDIWL

SEQ ID NO: 275 - protein, 116 aa, Artificial Sequence
  CD155 v12 IgV
PGTGDVVVQAPTQVTGFLGDSVTLPCYLQVPNMEVTHVSQLTWARHGESGSMAVFHQTQGPSYSESKRLEFVAARLGAELRNASLRMSGLRVEDEGNYTCLFVTLPQGSRSVDIWL

SEQ ID NO: 276 - protein, 116 aa, Artificial Sequence; identical to SEQ ID NO: 269
  CD155 v13 IgV

SEQ ID NO: 277 - protein, 116 aa, Artificial Sequence
  CD155 v14 IgV
PGTGDVVVQAPTQVTGFLGDSVTLPCYLQVPNMEVTHVSQLAWARHGESGSMAVFHQTQGPSYSESKRLEFVAARLGAELRNASLRMSGLRVEDEGNYTCLFVTFPQGSRSVDIWL

SEQ ID NO: 278 - protein, 116 aa, Artificial Sequence
  CD155 v15 IgV
PGTGDVVVQAPTQVTGFLGDSVTLPCYLQVPNMEVTHVSQLTWARHGESGSMAVFHQTQGPSYSESKRLEFVAARLGAELRNASLRMSGLHVEDEGNYTCLFVTFPQGSRSVDIWL

SEQ ID NO: 279 - protein, 116 aa, Artificial Sequence
  CD155 v16 IgV
PGTGDVVVQAPTQVSGFLGDSVTLPCCLQVPNMEVTHVSQLTWARHGESGSMAVFHQTQGPSYSESKRLEFVAARLGAELRNASLRMSGLRVEDEGNYTCLFVTFPQGSRSVDIWL

SEQ ID NO: 280 - protein, 116 aa, Artificial Sequence
  CD155 v17 IgV
PGTGDVVVQAPTQVPGFLGDSVTLPCYLQVPNMEVTHVSQLTWARHGESGSMAVFHQTQGPSYSESKRLEFVAARLGVEPRNASLRMFGLRVEDEGNYTCLFVTFPQGSRSVDIWL

SEQ ID NO: 281 - protein, 116 aa, Artificial Sequence
  CD155 v18 IgV
PGTGDVVVQAPTQVPGFLGDSVTLPCYLQVPNMEVTHVSQLTWARHGESGSMAVFHQTQGPSYSESKRLEFVAARLGAELRNASPRMFGLRVEDEGNYTCLFVTFPQGSRSVDIWL

SEQ ID NO: 282 - protein, 116 aa, Artificial Sequence
  CD155 v19 IgV
PGTGDVVVQAPTQVPGFLGDSVTLPCYLQVPNMEVTHVSQLTWARHGESGSMAVFHQTQGPSYSESKRLEFVAARLGAELRNASLRMFGLHVEDEGNYTCLFVTFPQGSRSVDIWL

SEQ ID NO: 283 - protein, 116 aa, Artificial Sequence
  CD155 v20 IgV
PGTGDVVVQEPTQVSGFLGDSVTLPCYLQVPNMEVTHVSQLTWARHGESGSMVVFHQTQGPSYSESKRLEFVAARLGAELRNASLRMSGLRVEDEGNYTCLFVTFPQGSRSVDIWL

SEQ ID NO: 284 - protein, 116 aa, Artificial Sequence
  CD155 v21 IgV
PGTGDVVVQAPTQVTGFLGDSVTLPCYLQVPNMEVTHVSQLTWARHGESGSMAVFHQTQGPSYSESKRLEFVAARLGAELRNASLRMSGLRVEDEGNYTCLFVTFPQGSRSADIWL

SEQ ID NO: 285 - protein, 116 aa, Artificial Sequence
  CD155 v22 IgV
PGTGDVVVQAPTQVTGFLGDSVTLPCYLQVPNMEVTHVSQLTWARHGESGSMAVFHKTQGPSYSESKRLEFVAARLGAELRNASLRMFGLRVEDEGNYTCLFVTFPQGSRSVDIWL

SEQ ID NO: 286 - protein, 125 aa, Homo sapiens [sequence omitted]

SEQ ID NO: 287 - protein, 329 aa, Artificial Sequence
  CD112 v1 ECD
QDVRVQVLPEVRGQLGGTVELPCHLLPPVPGLHISLVTWQRPDAPANHQNVAAFHPKMGPSFPSPKPGSERLSFVSAKQSTGQDTEAELQDATLALHGLTVEDEGNYTCEFVTFPKDSVRGMTWLRVIAKPKNQAEAQKVTFSQDPTTVALCISKEGRPPARISWLSSLDWEAKETQVSGTLAGTVTVTSRFTLVPSGRADGVTVTCKVEHESFEEPALIPVTLSVRYPPEVSISGYDDNWYLGRTDATLSCDVRSNPEPTGYDWSTTSGTFPTSAVAQGSQLVIHAVDSLFNTTFVCTVTNAVGMGRAEQVIFVRETPNTAGAGATGG

SEQ ID NO: 288 - protein, 329 aa, Artificial Sequence
  CD112 v2 ECD
QDVRVQVLPEVRGQLGGTAELPCHLLPPVPGLHISLVTWQRPDAPANHQNVAAFHPKMGPSFPGPKPGSERLSFVSAKQGTGQDTEAELQDATLALHSLTVEDEGYYTCEFVTFPKGSVRGMTWLRVIAKPKNQAEAQKVTFSQDPTTVALCISKEGRPPARISWLSSLDWEAKETQVSGTLAGTVTVTSRFTLVPSGRADGVTVTCKVEHESFEEPALIPVTLSVRYPPEVSISGYDDNWYLGRTDATLSCDVRSNPEPTGYDWSTTSGTFPTSAVAQGSQLVIHAVDSLFNTTFVCTVTNAVGMGRAEQVIFVRETPNTAGAGATGG

SEQ ID NO: 289 - protein, 329 aa, Artificial Sequence
  CD112 v3 ECD
QDVRVQVLPEVRGQLGGTVELPCHLLPPVPGPYISLVTWQRPDAPANHQNVAAFHPKMGPSFPSPKPGSERLSFVSAKQSTGQDTEAELQDATLALHGLTVEDEGNYTCEFVTFPKGSVRGMTWLRVIAKPKNQAEAQKVTFSQDPTTVALCISKEGRPPARISWLSSLDWEAKETQVSGTLAGTVTVTSRFTLVPSGRADGVTVTCKVEHESFEEPALIPVTLSVRYPPEVSISGYDDNWYLGRTDATLSCDVRSNPEPTGYDWSTTSGTFPTSAVAQGSQLVIHAVDSLFNTTFVCTVTNAVGMGRAEQVIFVRETPNTAGAGATGG

SEQ ID NO: 290 - protein, 329 aa, Artificial Sequence
  CD112 v4 ECD
QDVRVQVLPEVRGQLGGTVELPCHLLPPVPGLYISLVTWQRPDAPANHQNVAAFHPKMGPSFPSPKPGSERLSFVSAKQSTGQDTEAELQDATLVLHGLTVEDEGNYTCEFITFPKGSVRGMTWLRVIAKPKNQAEAQKVTFSQDPTTVALCISKEGRPPARISWLSSLDWEAKETQVSGTLAGTVTVTSRFTLVPSGRADGVTVTCKVEHESFEEPALIPVTLSVRYPPEVSISGYDDNWYLGRTDATLSCDVRSNPEPTGYDWSTTSGTFPTSAVAQGSQLVIHAVDSLFNTTFVCTVTNAVGMGRAEQVIFVRETPNTAGAGATGG

SEQ ID NO: 291 - protein, 329 aa, Artificial Sequence
  CD112 v5 ECD
QDVRVQVLPEVRGQLGGTVELPCHLLPSVPGLYISLVTWQRPDAPANHQNVAAFHPKMGPSFPSPKPGSERLSFVSAKQSTGQDTEAELQDATLALHGLTVEDEGNYTCEFVTFPKGSVRGMTWLRVIAKPKNQAEAQKVTFSQDPTTVALCISKEGRPPARISWLSSLDWEAKETQVSGTLAGTVTVTSRFTLVPSGRADGVTVTCKVEHESFEEPALIPVTLSVRYPPEVSISGYDDNWYLGRTDATLSCDVRSNPEPTGYDWSTTSGTFPTSAVAQGSQLVIHAVDSLFNTTFVCTVTNAVGMGRAEQVIFVRETPNTAGAGATGG

SEQ ID NO: 292 - protein, 329 aa, Artificial Sequence
  CD112 v6 ECD
QDVRVQVLPEVRGQLGGTVELPCHLLAPVPGLYISLVNWQRPDAPANHQNVAAFHPKMGPSFPSPKPGSERLSFVSAKQSTGQDTEAELQDATLALHGLTAEDEGNYTCEFVTFPKGSVRGMTWLRVIAKPKNQAEAQKVTFSQDPTTVALCISKEGRPPARISWLSSLDWEAKETQVSGTLAGTVTVTSRFTLVPSGRADGVTVTCKVEHESFEEPALIPVTLSVRYPPEVSISGYDDNWYLGRTDATLSCDVRSNPEPTGYDWSTTSGTFPTSAVAQGSQLVIHAVDSLFNTTFVCTVTNAVGMGRAEQVIFVRETPNTAGAGATGG

SEQ ID NO: 293 - protein, 329 aa, Artificial Sequence
  CD112 v7 ECD
QDVRVQVLPEVRGQLGGTVELPCHLLPPVPGLYISLVTWQRPDAPANHQNVAAFHPKMGPSFPSPKPGSERLSFVSAKQSTGQDTEAELQDATLALHGLTVEDEGNYTCEFATFPKGFVRGMTWLRVIAKPKNQAEAQKVTFSQDPTTVALCISKEGRPPARISWLSSLDWEAKETQVSGTLAGTVTVTSRFTLVPSGRADGVTVTCKVEHESFEEPALIPVTLSVRYPPEVSISGYDDNWYLGRTDATLSCDVRSNPEPTGYDWSTTSGTFPTSAVAQGSQLVIHAVDSLFNTTFVCTVTNAVGMGRAEQVIFVRETPNTAGAGATGG

SEQ ID NO: 294 - protein, 329 aa, Artificial Sequence
  CD112 v8 ECD
QDVRVQVLPEVWGQLGGTVELPCHLLPPVPGLYISLVTWQRPDAPANYQNVAASHPKMGPSFPSPKPGSERLSFVSAKQSTGQDTEAELQDATLALHGLTVEDEGNYTCEFATFPKGFVRGMTWLRVIAKPKNQAEAQKVTFSQDPTTVALCISKEGRPPARISWLSSLDWEAKETQVSGTLAGTVTVTSRFTLVPSGRADGVTVTCKVEHESFEEPALIPVTLSVRYPPEVSISGYDDNWYLGRTDATLSCDVRSNPEPTGYDWSTTSGTFPTSAVAQGSQLVIHAVDSLFNTTFVCTVTNAVGMGRAEQVIFVRETPNTAGAGATGG

SEQ ID NO: 295 - protein, 329 aa, Artificial Sequence
  CD112 v9 ECD
QDVRVQVLPEVWGQLGGTVELPCHLLPPVPGLYISLVTWQRPDAPANHQNVAAFHPKMGPSFPSPKPGSERLSFVSAKRSTGQDTEAELQDATLALHGLTVEDEGNYTCEFATFPKGFVRGMTWLRVIAKPKNQAEAQKVTFSQDPTTVALCISKEGRPPARISWLSSLDWEAKETQVSGTLAGTVTVTSRFTLVPSGRADGVTVTCKVEHESFEEPALIPVTLSVRYPPEVSISGYDDNWYLGRTDATLSCDVRSNPEPTGYDWSTTSGTFPTSAVAQGSQLVIHAVDSLFNTTFVCTVTNAVGMGRAEQVIFVRETPNTAGAGATGG

SEQ ID NO: 296 - protein, 329 aa, Artificial Sequence
  CD112 v10 ECD
QDVRVQVLPEVRGQLGGTVELPCHLLPPVPGLYISLVTWQRPDAPANHQNVAAFHPKMGPSFPSPKPGSERLSFVSAKQSTGQDTEAELQDATLALHGLTVEDEGNYTCEFASFPKGYVRGMTWLRVIAKPKNQAEAQKVTFSQDPTTVALCISKEGRPPARISWLSSLDWEAKETQVSGTLAGTVTVTSRFTLVPSGRADGVTVTCKVEHESFEEPALIPVTLSVRYPPEVSISGYDDNWYLGRTDATLSCDVRSNPEPTGYDWSTTSGTFPTSAVAQGSQLVIHAVDSLFNTTFVCTVTNAVGMGRAEQVIFVRETPNTAGAGATGG

SEQ ID NO: 297 - protein, 329 aa, Artificial Sequence
  CD112 v11 ECD
QDVRVQVLPEVRGQLGGTVELPCHLLPPVPGLYISLVTWQRPDAPANHQNVAAFHPKMGPSFPSPKPGSERLSFVSAKQSTGQDTEAELQDATLALHGLTVEDEGNYTCEFATFPKGYVRGMTWLRVIAKPKNQAEAQKVTFSQDPTTVALCISKEGRPPARISWLSSLDWEAKETQVSGTLAGTVTVTSRFTLVPSGRADGVTVTCKVEHESFEEPALIPVTLSVRYPPEVSISGYDDNWYLGRTDATLSCDVRSNPEPTGYDWSTTSGTFPTSAVAQGSQLVIHAVDSLFNTTFVCTVTNAVGMGRAEQVIFVRETPNTAGAGATGG

SEQ ID NO: 298 - protein, 329 aa, Artificial Sequence
  CD112 v12 ECD
QDVRVQVLPEVRGQLGGTVELPCHLLPPVPGLYISLVTWQRPDAPANHQNVAAFHPKMGPSFPSPKPGSERLSFVSAKQSTGQDTEAELQDATLALHGLTVEDEGIYTCEFATFPKGYVRGMTWLRVIAKPKNQAEAQKVTFSQDPTTVALCISKEGRPPARISWLSSLDWEAKETQVSGTLAGTVTVTSRFTLVPSGRADGVTVTCKVEHESFEEPALIPVTLSVRYPPEVSISGYDDNWYLGRTDATLSCDVRSNPEPTGYDWSTTSGTFPTSAVAQGSQLVIHAVDSLFNTTFVCTVTNAVGMGRAEQVIFVRETPNTAGAGATGG

SEQ ID NO: 299 - protein, 329 aa, Artificial Sequence
  CD112 v13 ECD
QDVRVQVLPEVRGQLGGTVELPCHLLPPVPGLYISLVTWQRPDAPANHQNVAAFHPKMGPSFPSPKPGSERLSFVSAKQSTGQDTEAELQDATLALHGLTVEDEGIYTCEFATFPKGFVRGMTWLRVIAKPKNQAEAQKVTFSQDPTTVALCISKEGRPPARISWLSSLDWEAKETQVSGTLAGTVTVTSRFTLVPSGRADGVTVTCKVEHESFEEPALIPVTLSVRYPPEVSISGYDDNWYLGRTDATLSCDVRSNPEPTGYDWSTTSGTFPTSAVAQGSQLVIHAVDSLFNTTFVCTVTNAVGMGRAEQVIFVRETPNTAGAGATGG

SEQ ID NO: 300 - protein, 329 aa, Artificial Sequence
  CD112 v14 ECD
QDVRVQVLPEVRGQLGGTVELPCHLLPPVPGLYISLVTWQRPDAPANHQNVAAFHPKMGPSFPSPKPGSERLSFVSAKQSTGQDTEAELQDATLTPHGLTVEDEGNYTCEFATFPKGYVRGMTWLRVIAKPKNQAEAQKVTFSQDPTTVALCISKEGRPPARISWLSSLDWEAKETQVSGTLAGTVTVTSRFTLVPSGRADGVTVTCKVEHESFEEPALIPVTLSVRYPPEVSISGYDDNWYLGRTDATLSCDVRSNPEPTGYDWSTTSGTFPTSAVAQGSQLVIHAVDSLFNTTFVCTVTNAVGMGRAEQVIFVRETPNTAGAGATGG

SEQ ID NO: 301 - protein, 329 aa, Artificial Sequence
  CD112 v15 ECD
QDVRVQVLPEVRGQLGGTVELPCHLLPPVPGLHISLVTWQRPDAPANHQNVAAFHPKMGPSFPSPKSGSERLSFVSAKQSTGQDTEAELQDATLALHGLTVEDEGYYTCEFVTFPKGSVRGMTWLRVIAKPKNQAEAQKVTFSQDPTTVALCISKEGRPPARISWLSSLDWEAKETQVSGTLAGTVTVTSRFTLVPSGRADGVTVTCKVEHESFEEPALIPVTLSVRYPPEVSISGYDDNWYLGRTDATLSCDVRSNPEPTGYDWSTTSGTFPTSAVAQGSQLVIHAVDSLFNTTFVCTVTNAVGMGRAEQVIFVRETPNTAGAGATGG

SEQ ID NO: 302 - protein, 329 aa, Artificial Sequence
  CD112 v16 ECD
QDVRVQVLPEVRGQLGGTVELPCHLLPPVPGLYISLVTWQRPDAPANHQNVAAFHPKMGPSFPSPKPGSERLSFVSAKQSTGQDTEAELQDATLALHGLTVEDEGYYTCEFVTFPKGSVRGMTWLRVIAKPKNQAEAQKVTFSQDPTTVALCISKEGRPPARISWLSSLDWEAKETQVSGTLAGTVTVTSRFTLVPSGRADGVTVTCKVEHESFEEPALIPVTLSVRYPPEVSISGYDDNWYLGRTDATLSCDVRSNPEPTGYDWSTTSGTFPTSAVAQGSQLVIHAVDSLFNTTFVCTVTNAVGMGRAEQVIFVRETPNTAGAGATGG

SEQ ID NO: 303 - protein, 329 aa, Artificial Sequence
  CD112 v17 ECD
QDVRVQVLPEVRGQLGGSVELPCHLLPPVPGLHISLVTWQRPDAPANHQNVAAFHPKMGPSFPSPKPGSERLSFVSAKQSTGQDTEAELQDATLALHGLTVEDEGNYTCEFVTFPKGSVRGMTWLRVIAKPKNQAEAQKVTFSQDPTTVALCISKEGRPPARISWLSSLDWEAKETQVSGTLAGTVTVTSRFTLVPSGRADGVTVTCKVEHESFEEPALIPVTLSVRYPPEVSISGYDDNWYLGRTDATLSCDVRSNPEPTGYDWSTTSGTFPTSAVAQGSQLVIHAVDSLFNTTFVCTVTNAVGMGRAEQVIFVRETPNTAGAGATGG

SEQ ID NO: 304 - protein, 329 aa, Artificial Sequence
  CD112 v18 ECD
QDVRVQVLSEVRGQLGGTVELPCHLLPPVPGLHISLVTWQRPDAPASHQNVAAFHPKMGPSFPSPKPGSERLSFVSAKQSTGQDTEAELQDATLALHGLTVEDEGNYTCEFVTFPKGSVRGMTWLRVIAKPKNQAEAQKVTFSQDPTTVALCISKEGRPPARISWLSSLDWEAKETQVSGTLAGTVTVTSRFTLVPSGRADGVTVTCKVEHESFEEPALIPVTLSVRYPPEVSISGYDDNWYLGRTDATLSCDVRSNPEPTGYDWSTTSGTFPTSAVAQGSQLVIHAVDSLFNTTFVCTVTNAVGMGRAEQVIFVRETPNTAGAGATGG

SEQ ID NO: 305 - protein, 329 aa, Artificial Sequence
  CD112 v19 ECD
QDVRVQVLPEVRGQLGGTVELPCHLLPPVPGLYISLVTWQRSDAPANHQNVAAFHPKMGPSFPSPKHGSERLSFVSAKQSTGQDTEAELQDATLALHGLTVEDEGNYTCEFVTFPKGSVRGMTWLRVIAKPKNQAEAQKVTFSQDPTTVALCISKEGRPPARISWLSSLDWEAKETQVSGTLAGTVTVTSRFTLVPSGRADGVTVTCKVEHESFEEPALIPVTLSVRYPPEVSISGYDDNWYLGRTDATLSCDVRSNPEPTGYDWSTTSGTFPTSAVAQGSQLVIHAVDSLFNTTFVCTVTNAVGMGRAEQVIFVRETPNTAGAGATGG

SEQ ID NO: 306 - protein, 329 aa, Artificial Sequence
  CD112 v20 ECD
QDVRVQVLPEVRGQLGGTVELPCHLLLPVPGPYISLVTWQRSDAPANHQNVAAFHPKMGPSFPSPKPGSERLSFVSAKQSTGQDTEAELQDATLALHGLTVEDEGNYTCEFVTFPKGSVRGMTWLRVIAKPKNQAEAQKVTFSQDPTTVALCISKEGRPPARISWLSSLDWEAKETQVSGTLAGTVTVTSRFTLVPSGRADGVTVTCKVEHESFEEPALIPVTLSVRYPPEVSISGYDDNWYLGRTDATLSCDVRSNPEPTGYDWSTTSGTFPTSAVAQGSQLVIHAVDSLFNTTFVCTVTNAVGMGRAEQVIFVRETPNTAGAGATGG

SEQ ID NO: 307 - protein, 329 aa, Artificial Sequence
  CD112 v21 ECD
QDVRVQVLPEVRGQLGGTVELPCHLLPPVPGLYISLVTWQRPDAPANHQNVAAFHPKMGPSFPSPKPGSERLSFVSAKQSTGQDTEAELQDATLALHDLTVEDEGNYTCEFVTFPKGSVRGMTWLRVIAKPKNQAEAQKVTFSQDPTTVALCISKEGRPPARISWLSSLDWEAKETQVSGTLAGTVTVTSRFTLVPSGRADGVTVTCKVEHESFEEPALIPVTLSVRYPPEVSISGYDDNWYLGRTDATLSCDVRSNPEPTGYDWSTTSGTFPTSAVAQGSQLVIHAVDSLFNTTFVCTVTNAVGMGRAEQVIFVRETPNTAGAGATGG

SEQ ID NO: 308 - protein, 329 aa, Artificial Sequence
  CD112 v22 ECD
QDVRVQVLPEVRGQLGGTVELPCHLLPPVPGLHIPLVTWQRPDAPANHQNVAAFHPKMGPSFPSPKPGSERLSFVSAKQSTGQDTEAELQDATLALHGLTVEDEGYYTCEFVTFPKGSVRGMTWLRVIAKPKNQAEAQKVTFSQDPTTVALCISKEGRPPARISWLSSLDWEAKETQVSGTLAGTVTVTSRFTLVPSGRADGVTVTCKVEHESFEEPALIPVTLSVRYPPEVSISGYDDNWYLGRTDATLSCDVRSNPEPTGYDWSTTSGTFPTSAVAQGSQLVIHAVDSLFNTTFVCTVTNAVGMGRAEQVIFVRETPNTAGAGATGG

SEQ ID NO: 309 - protein, 329 aa, Artificial Sequence
  CD112 v23 ECD
QDVRVQVLPEVRGQLGGTVELPCHLLPPVPGPYISLVTWQRSDAPANHQNVAAFHPKMGPSFPSPKPGSERLSFVSAKQSTGQDTEAELQDATLALHGLAVEDEGNYTCEFVTFPKGSVRGMTWLRVIAKPKNQAEAQKVTFSQDPTTVALCISKEGRPPARISWLSSLDWEAKETQVSGTLAGTVTVTSRFTLVPSGRADGVTVTCKVEHESFEEPALIPVTLSVRYPPEVSISGYDDNWYLGRTDATLSCDVRSNPEPTGYDWSTTSGTFPTSAVAQGSQLVIHAVDSLFNTTFVCTVTNAVGMGRAEQVIFVRETPNTAGAGATGG

SEQ ID NO: 310 - protein, 329 aa, Artificial Sequence
  CD112 v24 ECD
QDVRVQVLPEVRGQLGGTVELPCHLLSPVPGLYISLVTWQRPDASANHQNVAAFHPKMGPSFPSPKPGSERLSFVSAKQSTGQDTEAELQDATLALHGLTVEDEGIYTCEFVTFPKGSVRGMTWLRVIAKPKNQAEAQKVTFSQDPTTVALCISKEGRPPARISWLSSLDWEAKETQVSGTLAGTVTVTSRFTLVPSGRADGVTVTCKVEHESFEEPALIPVTLSVRYPPEVSISGYDDNWYLGRTDATLSCDVRSNPEPTGYDWSTTSGTFPTSAVAQGSQLVIHAVDSLFNTTFVCTVTNAVGMGRAEQVIFVRETPNTAGAGATGG

SEQ ID NO: 311 - protein, 329 aa, Artificial Sequence
  CD112 v25 ECD
QDVRVQVLPEVRGQLGGTVELPCHLLPPVPGLHISLVTWQRPDAPAKHQNVAAFHPKMGPSFPSPKPGSERLSFVSAKQSTGQDTEAELQDATLALHGLTVEDEGNYTCEFVTFPKGSVRGMTWLRVIAKPKNQAEAQKVTFSQDPTTVALCISKEGRPPARISWLSSLDWEAKETQVSGTLAGTVTVTSRFTLVPSGRADGVTVTCKVEHESFEEPALIPVTLSVRYPPEVSISGYDDNWYLGRTDATLSCDVRSNPEPTGYDWSTTSGTFPTSAVAQGSQLVIHAVDSLFNTTFVCTVTNAVGMGRAEQVIFVRETPNTAGAGATGG

SEQ ID NO: 312 - protein, 329 aa, Artificial Sequence
  CD112 v26 ECD
QDVRVQVLPEVRGQLGGTVELPCHLLPPVPGLHISLVTWQRPDAPANHQNVAAFHPKMGPSFPSPKPGSERLSFVSAKQSTGQDTEAELQDATLALHGLTVEDEGYYTCEFVTFPKGSVRGMTWLRVIAKPKNQAEAQKVTFSQDPTTVALCISKEGRPPARISWLSSLDWEAKETQVSGTLAGTVTVTSRFTLVPSGRADGVTVTCKVEHESFEEPALIPVTLSVRYPPEVSISGYDDNWYLGRTDATLSCDVRSNPEPTGYDWSTTSGTFPTSAVAQGSQLVIHAVDSLFNTTFVCTVTNAVGMGRAEQVIFVRETPNTAGAGATGG

SEQ ID NO: 313 - protein, 329 aa, Artificial Sequence
  CD112 v27 ECD
QDVRVQVLPEVRGQLGGTVELPCHLLPPVPGLYISLVTWQRPDAPANHQNVAAFHPKMGPSFPSPKPGSERLSFVSARQSTGQGTEAELQDATLALHGLTVEDEGNYTCEFVTSPKGSVRGMTWLRVIAKPKNQAEAQKVTFSQDPTTVALCISKEGRPPARISWLSSLDWEAKETQVSGTLAGTVTVTSRFTLVPSGRADGVTVTCKVEHESFEEPALIPVTLSVRYPPEVSISGYDDNWYLGRTDATLSCDVRSNPEPTGYDWSTTSGTFPTSAVAQGSQLVIHAVDSLFNTTFVCTVTNAVGMGRAEQVIFVRETPNTAGAGATGG

SEQ ID NO: 314 - protein, 329 aa, Artificial Sequence
  CD112 v28 ECD
QDVRVQVLPEVRGQLGGTVELPCHLLPPVPGLHISLVTWQRPDAPAKHQNVAALHPKMGPSFPSPKPGSERLSFVSAKQSTGQDTEAELQDATLALHGLTVEDEGNYTCEFVTFPKGSVRGMTWLRVIAKPKNQAEAQKVTFSQDPTTVALCISKEGRPPARISWLSSLDWEAKETQVSGTLAGTVTVTSRFTLVPSGRADGVTVTCKVEHESFEEPALIPVTLSVRYPPEVSISGYDDNWYLGRTDATLSCDVRSNPEPTGYDWSTTSGTFPTSAVAQGSQLVIHAVDSLFNTTFVCTVTNAVGMGRAEQVIFVRETPNTAGAGATGG

SEQ ID NO: 315 - protein, 329 aa, Artificial Sequence
  CD112 v29 ECD
QDVRVQVLPEVRGQLGGTVELPCHLLPPVPGLHISLVTWQRPDAPANHQNVAAFHPKMGPSFPSPKPGSERLSFVSAKQSTGQDTEAELQDATLALHGLTVEDEGNYTCEFVTFPKGSVRGMTWLRVIAKPKNQAEAQKVTFSQDPTTVALCISKEGRPPARISWLSSLDWEAKETQVSGTLAGTVTVTSRFTLVPSGRADGVTVTCKVEHESFEEPALIPVTLSVRYPPEVSISGYDDNWYLGRTDATLSCDVRSNPEPTGYDWSTTSGTFPTSAVAQGSQLVIHAVDSLFNTTFVCTVTNAVGMGRAEQVIFVRETPNTAGAGATGG

SEQ ID NO: 316 - protein, 329 aa, Artificial Sequence
  CD112 v30 ECD
QDVRVQVLPEVRGQLGGTVELPCHLLPPVPGLYISLVTWQRPDAPANHQNVAAFHPKMGPSFPSPKPGSERLSFVSAKQSTGQDTEAELQDATLVLHGLTVEDEGNYTCEFVTFPKGSVRGMTWLRVIAKPKNQAEAQKVTFSQDPTTVALCISKEGRPPARISWLSSLDWEAKETQVSGTLAGTVTVTSRFTLVPSGRADGVTVTCKVEHESFEEPALIPVTLSVRYPPEVSISGYDDNWYLGRTDATLSCDVRSNPEPTGYDWSTTSGTFPTSAVAQGSQLVIHAVDSLFNTTFVCTVTNAVGMGRAEQVIFVRETPNTAGAGATGG

SEQ ID NO: 317 - protein, 329 aa, Artificial Sequence
  CD112 v31 ECD
QDVRVQVLPEVWGQLGGTVELPCHLLPPVPGLYISLVTWQRPDAPANHQNVAAFHPKMGPSFPSPKPGSERLSFVSAKQSTGQDTEAELQDATLALHGLTVEDEGNYTCEFVTFPKGSVRGMTWLRVIAKPKNQAEAQKVTFSQDPTTVALCISKEGRPPARISWLSSLDWEAKETQVSGTLAGTVTVTSRFTLVPSGRADGVTVTCKVEHESFEEPALIPVTLSVRYPPEVSISGYDDNWYLGRTDATLSCDVRSNPEPTGYDWSTTSGTFPTSAVAQGSQLVIHAVDSLFNTTFVCTVTNAVGMGRAEQVIFVRETPNTAGAGATGG

SEQ ID NO: 318 - protein, 329 aa, Artificial Sequence
  CD112 v32 ECD
QDVRVQVLPEVWGQLGGTVELPCHLLSPVPGLYISLVTWQRPDAPANHQNVAAFHPKMGPSFPSPKPGSERLSFVSAKQSTGQDTEAELQDATLALHGLTVEDEGNYTCEFVTFPKGSVRGMTWLRVIAKPKNQAEAQKVTFSQDPTTVALCISKEGRPPARISWLSSLDWEAKETQVSGTLAGTVTVTSRFTLVPSGRADGVTVTCKVEHESFEEPALIPVTLSVRYPPEVSISGYDDNWYLGRTDATLSCDVRSNPEPTGYDWSTTSGTFPTSAVAQGSQLVIHAVDSLFNTTFVCTVTNAVGMGRAEQVIFVRETPNTAGAGATGG

SEQ ID NO: 319 - protein, 329 aa, Artificial Sequence
  CD112 v33 ECD
QDVRVQVLPEVRGQLGGTVELPCHLLPPVPGLHISLVTWQRPDAPANHQNMAAFHPKMGPSFPSPKPGSERLSFVSAKQSTGQDTEAELQDATLALHGLTVEDEGNYTCEFVTFPKGSVRGMTWLRVIAKPKNQAEAQKVTFSQDPTTVALCISKEGRPPARISWLSSLDWEAKETQVSGTLAGTVTVTSRFTLVPSGRADGVTVTCKVEHESFEEPALIPVTLSVRYPPEVSISGYDDNWYLGRTDATLSCDVRSNPEPTGYDWSTTSGTFPTSAVAQGSQLVIHAVDSLFNTTFVCTVTNAVGMGRAEQVIFVRETPNTAGAGATGG

SEQ ID NO: 320 - protein, 329 aa, Artificial Sequence
  CD112 v34 ECD
QDVRVQVLPEVRGQLGGTVELPCHLLPPVPGLHISLVTWQRPDAPANHQNVAAFHPKMGPSFPSPKPGSERLSFVSAKQSTGQDTEAELQDATLALHGLTVEDEGNYTCEFVTFPKGTVRGMTWLRVIAKPKNQAEAQKVTFSQDPTTVALCISKEGRPPARISWLSSLDWEAKETQVSGTLAGTVTVTSRFTLVPSGRADGVTVTCKVEHESFEEPALIPVTLSVRYPPEVSISGYDDNWYLGRTDATLSCDVRSNPEPTGYDWSTTSGTFPTSAVAQGSQLVIHAVDSLFNTTFVCTVTNAVGMGRAEQVIFVRETPNTAGAGATGG

SEQ ID NO: 321 - protein, 329 aa, Artificial Sequence
  CD112 v35 ECD
QDVRVQVLPEVRGQLGGTVELPCHLLPPVPGLHISLVTWQRPDAPANHQNVAAFHPKMGPSFPSPKPGSERLSFVSAKQSTGQDTEAELQDATLALHGLTAEDEGNYTCEFVTFSKGSVRGMTWLRVIAKPKNQAEAQKVTFSQDPTTVALCISKEGRPPARISWLSSLDWEAKETQVSGTLAGTVTVTSRFTLVPSGRADGVTVTCKVEHESFEEPALIPVTLSVRYPPEVSISGYDDNWYLGRTDATLSCDVRSNPEPTGYDWSTTSGTFPTSAVAQGSQLVIHAVDSLFNTTFVCTVTNAVGMGRAEQVIFVRETPNTAGAGATGG

SEQ ID NO: 322 - protein, 329 aa, Artificial Sequence
  CD112 v36 ECD
QDVRVQVLPEVRGQLGGTVELPCRLLPPVPGLYISLVNWQRPGAPANHQNVAAFHPKMGPSFPSPKPGSERLSFVSAKQSTGQDTEAELQDATLALHGLTVEDEGNYTCEFVTFPKGSVRGMTWLRVIAKPKNQAEAQKVTFSQDPTTVALCISKEGRPPARISWLSSLDWEAKETQVSGTLAGTVTVTSRFTLVPSGRADGVTVTCKVEHESFEEPALIPVTLSVRYPPEVSISGYDDNWYLGRTDATLSCDVRSNPEPTGYDWSTTSGTFPTSAVAQGSQLVIHAVDSLFNTTFVCTVTNAVGMGRAEQVIFVRETPNTAGAGATGG

SEQ ID NO: 323 - protein, 329 aa, Artificial Sequence
  CD112 v37 ECD
QDVRVQVLPEVRGQLGGTVELPCHLLPPVPGLYISLVTWQRPDAPANHQNVAAFHPKMGPSFPSPKPGSERLSFVSAKQSTGQDTEAELQDATLALHGLTVEDEGNYTCEFVTFPKGSVRGMTWLRVIAKPKNQAEAQKVTFSQDPTTVALCISKEGRPPARISWLSSLDWEAKETQVSGTLAGTVTVTSRFTLVPSGRADGVTVTCKVEHESFEEPALIPVTLSVRYPPEVSISGYDDNWYLGRTDATLSCDVRSNPEPTGYDWSTTSGTFPTSAVAQGSQLVIHAVDSLFNTTFVCTVTNAVGMGRAEQVIFVRETPNTAGAGATGG

SEQ ID NO: 324 - protein, 329 aa, Artificial Sequence
  CD112 v38 ECD
QDVRVQVLPEVRGQLGGTVELPCHLLAPVPGLYISLVTWQRPDAPANHQNVAAFHPKMGPSFPSPKPGSERLSFVSAKQSTGQDTEAELQDATLALHGLTVEDEGNYTCEFVTFPKGSVRGMTWLRVIAKPKNQAEAQKVTFSQDPTTVALCISKEGRPPARISWLSSLDWEAKETQVSGTLAGTVTVTSRFTLVPSGRADGVTVTCKVEHESFEEPALIPVTLSVRYPPEVSISGYDDNWYLGRTDATLSCDVRSNPEPTGYDWSTTSGTFPTSAVAQGSQLVIHAVDSLFNTTFVCTVTNAVGMGRAEQVIFVRETPNTAGAGATGG

SEQ ID NO: 325 - protein, 329 aa, Artificial Sequence
  CD112 v39 ECD
QDVRVQVLPEVRGQLGGTVELPCHLLPPVPGLYISLVTWQRPDAPANHQNVAAFHPKMGPSFPSPKPGSERLSFVSAKQSTGQDTEAELQDATLALHGLTVEDEGNYTCEFVTFPKGTVRGMTWLRVIAKPKNQAEAQKVTFSQDPTTVALCISKEGRPPARISWLSSLDWEAKETQVSGTLAGTVTVTSRFTLVPSGRADGVTVTCKVEHESFEEPALIPVTLSVRYPPEVSISGYDDNWYLGRTDATLSCDVRSNPEPTGYDWSTTSGTFPTSAVAQGSQLVIHAVDSLFNTTFVCTVTNAVGMGRAEQVIFVRETPNTAGAGATGG

SEQ ID NO: 326 - protein, 329 aa, Artificial Sequence
  CD112 v40 ECD
QDVRVQVLPEVWGQLGGTVELPCHLLPPVPGLYISLVTWQRPDAPANHQNVAAFHPKMGPSFPSPKPGSERLSFVSAKQSTGQDTEAELQDATLALHGLTVEDEGNYTCEFVTFPKGSVRGITWLRVIAKPKNQAEAQKVTFSQDPTTVALCISKEGRPPARISWLSSLDWEAKETQVSGTLAGTVTVTSRFTLVPSGRADGVTVTCKVEHESFEEPALIPVTLSVRYPPEVSISGYDDNWYLGRTDATLSCDVRSNPEPTGYDWSTTSGTFPTSAVAQGSQLVIHAVDSLFNTTFVCTVTNAVGMGRAEQVIFVRETPNTAGAGATGG

SEQ ID NO: 327 - protein, 329 aa, Artificial Sequence
  CD112 v41 ECD
QDVRVQVLPEVRGQLGGTVELPCHLLPPVPGLYISLVTWQRPDAPANHQNVAAFHPKMGPSFPSPKPGSERLSFVSAKQSTGKDTEAELQDATLALHGLTVEDEGYYTCEFVTFPKGSVRGMTWLRVIAKPKNQAEAQKVTFSQDPTTVALCISKEGRPPARISWLSSLDWEAKETQVSGTLAGTVTVTSRFTLVPSGRADGVTVTCKVEHESFEEPALIPVTLSVRYPPEVSISGYDDNWYLGRTDATLSCDVRSNPEPTGYDWSTTSGTFPTSAVAQGSQLVIHAVDSLFNTTFVCTVTNAVGMGRAEQVIFVRETPNTAGAGATGG

SEQ ID NO: 328 - protein, 329 aa, Artificial Sequence
  CD112 v42 ECD
QDVRVQVLPEVWGQLGGTVELPCHLLSPVPGLYISLVTWQRPDAPANHQNVAAFHPKMGPSFPSPKPGSERLSFVSAKQSTGQDTEAELQDATLALHGLTVEDEGNYTCEFVTFPKGTVRGMTWLRVIAKPKNQAEAQKVTFSQDPTTVALCISKEGRPPARISWLSSLDWEAKETQVSGTLAGTVTVTSRFTLVPSGRADGVTVTCKVEHESFEEPALIPVTLSVRYPPEVSISGYDDNWYLGRTDATLSCDVRSNPEPTGYDWSTTSGTFPTSAVAQGSQLVIHAVDSLFNTTFVCTVTNAVGMGRAEQVIFVRETPNTAGAGATGG

SEQ ID NO: 329 - protein, 329 aa, Artificial Sequence
  CD112 v43 ECD
QDVRVQVLPEVRGQLGGTVELPCHLLPSVPGLHISLVTWQRPDAPANHQNVAAFHPKMGPSFPSPKPGSERLSFVSAKQSTGQDTEAELQDATLALHGLTVEDEGNYTCEFVTFPKGSVRGMTWLRVIAKPKNQAEAQKVTFSQDPTTVALCISKEGRPPARISWLSSLDWEAKETQVSGTLAGTVTVTSRFTLVPSGRADGVTVTCKVEHESFEEPALIPVTLSVRYPPEVSISGYDDNWYLGRTDATLSCDVRSNPEPTGYDWSTTSGTFPTSAVAQGSQLVIHAVDSLFNTTFVCTVTNAVGMGRAEQVIFVRETPNTAGAGATGG

SEQ ID NO: 330 - protein, 329 aa, Artificial Sequence
  CD112 v44 ECD
QDVRVQVLPEVRGQLGGTVELPCHLLSPVPGLYISLVTWQRPDAPANHQNVAAFHPKMGPSFPSPKPGSERLSFVSAKQSTGQDTEAELRDATLALHGLTVEDEGNYTCEFVTFPKGSVRGMTWLRVIAKPKNQAEAQKVTFSQDPTTVALCISKEGRPPARISWLSSLDWEAKETQVSGTLAGTVTVTSRFTLVPSGRADGVTVTCKVEHESFEEPALIPVTLSVRYPPEVSISGYDDNWYLGRTDATLSCDVRSNPEPTGYDWSTTSGTFPTSAVAQGSQLVIHAVDSLFNTTFVCTVTNAVGMGRAEQVIFVRETPNTAGAGATGG

SEQ ID NO: 331 - protein, 329 aa, Artificial Sequence
  CD112 v45 ECD
QDVRVQVLPEVRGQVGGTVELPCHLLAPVPGLYISLVTWQRPDAPANHQNVAAFHPKMGPSFPSPKPGSERLSFVSAKQSTGQDTEAELQDATLALHGLTVEDEGNYTCEFVTFPKGTVRGMTWLRVIAKPKNQAEAQKVTFSQDPTTVALCISKEGRPPARISWLSSLDWEAKETQVSGTLAGTVTVTSRFTLVPSGRADGVTVTCKVEHESFEEPALIPVTLSVRYPPEVSISGYDDNWYLGRTDATLSCDVRSNPEPTGYDWSTTSGTFPTSAVAQGSQLVIHAVDSLFNTTFVCTVTNAVGMGRAEQVIFVRETPNTAGAGATGG

SEQ ID NO: 332 - protein, 329 aa, Artificial Sequence
  CD112 v46 ECD
QDVRVQVLPEVRGQLGGTVELPCHLLPPVPGLHISLVTWQRPDAPANHQNVAAFHPKMGPSFPSPKPGSERLSFVSAKQSTGQDTEAELQDATLALHGLTVEDEGYYICEFVTFPKGSVRGMTWLRVIAKPKNQAEAQKVTFSQDPTTVALCISKEGRPPARISWLSSLDWEAKETQVSGTLAGTVTVTSRFTLVPSGRADGVTVTCKVEHESFEEPALIPVTLSVRYPPEVSISGYDDNWYLGRTDATLSCDVRSNPEPTGYDWSTTSGTFPTSAVAQGSQLVIHAVDSLFNTTFVCTVTNAVGMGRAEQVIFVRETPNTAGAGATGG

SEQ ID NO: 333 - protein, 329 aa, Artificial Sequence
  CD112 v47 ECD
QDVRVQVLPEVRGQLGGTVELPCHLLPPVPGLHISLVTWQRPDAPANHQNVAAFHLKMGPSFPSPKPGSERLSFMSAKQSTGQDTEAELQDATLALHGLTMEDEGNYTCEFVTFPKGSVRGMTWLRVIAKPKNQAEAQKVTFSQDPTTVALCISKEGRPPARISWLSSLDWEAKETQVSGTLAGTVTVTSRFTLVPSGRADGVTVTCKVEHESFEEPALIPVTLSVRYPPEVSISGYDDNWYLGRTDATLSCDVRSNPEPTGYDWSTTSGTFPTSAVAQGSQLVIHAVDSLFNTTFVCTVTNAVGMGRAEQVIFVRETPNTAGAGATGG

SEQ ID NO: 334 - protein, 125 aa, Artificial Sequence
  CD112 v1 IgV
QDVRVQVLPEVRGQLGGTVELPCHLLPPVPGLHISLVTWQRPDAPANHQNVAAFHPKMGPSFPSPKPGSERLSFVSAKQSTGQDTEAELQDATLALHGLTVEDEGNYTCEFVTFPKDSVRGMTWL

SEQ ID NO: 335 - protein, 125 aa, Artificial Sequence
  CD112 v2 IgV
QDVRVQVLPEVRGQLGGTAELPCHLLPPVPGLHISLVTWQRPDAPANHQNVAAFHPKMGPSFPGPKPGSERLSFVSAKQGTGQDTEAELQDATLALHSLTVEDEGYYTCEFVTFPKGSVRGMTWL

SEQ ID NO: 336 - protein, 125 aa, Artificial Sequence
  CD112 v3 IgV
QDVRVQVLPEVRGQLGGTVELPCHLLPPVPGPYISLVTWQRPDAPANHQNVAAFHPKMGPSFPSPKPGSERLSFVSAKQSTGQDTEAELQDATLALHGLTVEDEGNYTCEFVTFPKGSVRGMTWL

SEQ ID NO: 337 - protein, 125 aa, Artificial Sequence
  CD112 v4 IgV
QDVRVQVLPEVRGQLGGTVELPCHLLPPVPGLYISLVTWQRPDAPANHQNVAAFHPKMGPSFPSPKPGSERLSFVSAKQSTGQDTEAELQDATLVLHGLTVEDEGNYTCEFITFPKGSVRGMTWL

SEQ ID NO: 338 - protein, 125 aa, Artificial Sequence
  CD112 v5 IgV
QDVRVQVLPEVRGQLGGTVELPCHLLPSVPGLYISLVTWQRPDAPANHQNVAAFHPKMGPSFPSPKPGSERLSFVSAKQSTGQDTEAELQDATLALHGLTVEDEGNYTCEFVTFPKGSVRGMTWL

SEQ ID NO: 339 - protein, 125 aa, Artificial Sequence
  CD112 v6 IgV
QDVRVQVLPEVRGQLGGTVELPCHLLAPVPGLYISLVNWQRPDAPANHQNVAAFHPKMGPSFPSPKPGSERLSFVSAKQSTGQDTEAELQDATLALHGLTAEDEGNYTCEFVTFPKGSVRGMTWL

SEQ ID NO: 340 - protein, 125 aa, Artificial Sequence
  CD112 v7 IgV
QDVRVQVLPEVRGQLGGTVELPCHLLPPVPGLYISLVTWQRPDAPANHQNVAAFHPKMGPSFPSPKPGSERLSFVSAKQSTGQDTEAELQDATLALHGLTVEDEGNYTCEFATFPKGFVRGMTWL

SEQ ID NO: 341 - protein, 125 aa, Artificial Sequence
  CD112 v8 IgV
QDVRVQVLPEVWGQLGGTVELPCHLLPPVPGLYISLVTWQRPDAPANYQNVAASHPKMGPSFPSPKPGSERLSFVSAKQSTGQDTEAELQDATLALHGLTVEDEGNYTCEFATFPKGFVRGMTWL

SEQ ID NO: 342 - protein, 125 aa, Artificial Sequence
  CD112 v9 IgV
QDVRVQVLPEVWGQLGGTVELPCHLLPPVPGLYISLVTWQRPDAPANHQNVAAFHPKMGPSFPSPKPGSERLSFVSAKRSTGQDTEAELQDATLALHGLTVEDEGNYTCEFATFPKGFVRGMTWL

SEQ ID NO: 343 - protein, 125 aa, Artificial Sequence
  CD112 v10 IgV
QDVRVQVLPEVRGQLGGTVELPCHLLPPVPGLYISLVTWQRPDAPANHQNVAAFHPKMGPSFPSPKPGSERLSFVSAKQSTGQDTEAELQDATLALHGLTVEDEGNYTCEFASFPKGYVRGMTWL

SEQ ID NO: 344 - protein, 125 aa, Artificial Sequence
  CD112 v11 IgV
QDVRVQVLPEVRGQLGGTVELPCHLLPPVPGLYISLVTWQRPDAPANHQNVAAFHPKMGPSFPSPKPGSERLSFVSAKQSTGQDTEAELQDATLALHGLTVEDEGNYTCEFATFPKGYVRGMTWL

SEQ ID NO: 345 - protein, 125 aa, Artificial Sequence
  CD112 v12 IgV
QDVRVQVLPEVRGQLGGTVELPCHLLPPVPGLYISLVTWQRPDAPANHQNVAAFHPKMGPSFPSPKPGSERLSFVSAKQSTGQDTEAELQDATLALHGLTVEDEGIYTCEFATFPKGYVRGMTWL

SEQ ID NO: 346 - protein, 125 aa, Artificial Sequence
  CD112 v13 IgV
QDVRVQVLPEVRGQLGGTVELPCHLLPPVPGLYISLVTWQRPDAPANHQNVAAFHPKMGPSFPSPKPGSERLSFVSAKQSTGQDTEAELQDATLALHGLTVEDEGIYTCEFATFPKGFVRGMTWL

SEQ ID NO: 347 - protein, 125 aa, Artificial Sequence
  CD112 v14 IgV
QDVRVQVLPEVRGQLGGTVELPCHLLPPVPGLYISLVTWQRPDAPANHQNVAAFHPKMGPSFPSPKPGSERLSFVSAKQSTGQDTEAELQDATLTPHGLTVEDEGNYTCEFATFPKGYVRGMTWL

SEQ ID NO: 348 - protein, 125 aa, Artificial Sequence
  CD112 v15 IgV
QDVRVQVLPEVRGQLGGTVELPCHLLPPVPGLHISLVTWQRPDAPANHQNVAAFHPKMGPSFPSPKSGSERLSFVSAKQSTGQDTEAELQDATLALHGLTVEDEGYYTCEFVTFPKGSVRGMTWL

SEQ ID NO: 349 - protein, 125 aa, Artificial Sequence
  CD112 v16 IgV
QDVRVQVLPEVRGQLGGTVELPCHLLPPVPGLYISLVTWQRPDAPANHQNVAAFHPKMGPSFPSPKPGSERLSFVSAKQSTGQDTEAELQDATLALHGLTVEDEGYYTCEFVTFPKGSVRGMTWL

SEQ ID NO: 350 - protein, 125 aa, Artificial Sequence
  CD112 v17 IgV
QDVRVQVLPEVRGQLGGSVELPCHLLPPVPGLHISLVTWQRPDAPANHQNVAAFHPKMGPSFPSPKPGSERLSFVSAKQSTGQDTEAELQDATLALHGLTVEDEGNYTCEFVTFPKGSVRGMTWL

SEQ ID NO: 351 - protein, 125 aa, Artificial Sequence
  CD112 v18 IgV
QDVRVQVLSEVRGQLGGTVELPCHLLPPVPGLHISLVTWQRPDAPASHQNVAAFHPKMGPSFPSPKPGSERLSFVSAKQSTGQDTEAELQDATLALHGLTVEDEGNYTCEFVTFPKGSVRGMTWL

SEQ ID NO: 352 - protein, 125 aa, Artificial Sequence
  CD112 v19 IgV
QDVRVQVLPEVRGQLGGTVELPCHLLPPVPGLYISLVTWQRSDAPANHQNVAAFHPKMGPSFPSPKHGSERLSFVSAKQSTGQDTEAELQDATLALHGLTVEDEGNYTCEFVTFPKGSVRGMTWL

SEQ ID NO: 353 - protein, 125 aa, Artificial Sequence
  CD112 v20 IgV
QDVRVQVLPEVRGQLGGTVELPCHLLLPVPGPYISLVTWQRSDAPANHQNVAAFHPKMGPSFPSPKPGSERLSFVSAKQSTGQDTEAELQDATLALHGLTVEDEGNYTCEFVTFPKGSVRGMTWL

SEQ ID NO: 354 - protein, 125 aa, Artificial Sequence
  CD112 v21 IgV
QDVRVQVLPEVRGQLGGTVELPCHLLPPVPGLYISLVTWQRPDAPANHQNVAAFHPKMGPSFPSPKPGSERLSFVSAKQSTGQDTEAELQDATLALHDLTVEDEGNYTCEFVTFPKGSVRGMTWL

SEQ ID NO: 355 - protein, 125 aa, Artificial Sequence
  CD112 v22 IgV
QDVRVQVLPEVRGQLGGTVELPCHLLPPVPGLHIPLVTWQRPDAPANHQNVAAFHPKMGPSFPSPKPGSERLSFVSAKQSTGQDTEAELQDATLALHGLTVEDEGYYTCEFVTFPKGSVRGMTWL

SEQ ID NO: 356 - protein, 125 aa, Artificial Sequence
  CD112 v23 IgV
QDVRVQVLPEVRGQLGGTVELPCHLLPPVPGPYISLVTWQRSDAPANHQNVAAFHPKMGPSFPSPKPGSERLSFVSAKQSTGQDTEAELQDATLALHGLAVEDEGNYTCEFVTFPKGSVRGMTWL

SEQ ID NO: 357 - protein, 125 aa, Artificial Sequence
  CD112 v24 IgV
QDVRVQVLPEVRGQLGGTVELPCHLLSPVPGLYISLVTWQRPDASANHQNVAAFHPKMGPSFPSPKPGSERLSFVSAKQSTGQDTEAELQDATLALHGLTVEDEGIYTCEFVTFPKGSVRGMTWL

SEQ ID NO: 358 - protein, 125 aa, Artificial Sequence
  CD112 v25 IgV
QDVRVQVLPEVRGQLGGTVELPCHLLPPVPGLHISLVTWQRPDAPAKHQNVAAFHPKMGPSFPSPKPGSERLSFVSAKQSTGQDTEAELQDATLALHGLTVEDEGNYTCEFVTFPKGSVRGMTWL

SEQ ID NO: 359 - protein, 125 aa, Artificial Sequence
  CD112 v26 IgV
QDVRVQVLPEVRGQLGGTVELPCHLLPPVPGLHISLVTWQRPDAPANHQNVAAFHPKMGPSFPSPKPGSERLSFVSAKQSTGQDTEAELQDATLALHGLTVEDEGYYTCEFVTFPKGSVRGMTWL

SEQ ID NO: 360 - protein, 125 aa, Artificial Sequence
  CD112 v27 IgV
QDVRVQVLPEVRGQLGGTVELPCHLLPPVPGLYISLVTWQRPDAPANHQNVAAFHPKMGPSFPSPKPGSERLSFVSARQSTGQGTEAELQDATLALHGLTVEDEGNYTCEFVTSPKGSVRGMTWL

SEQ ID NO: 361 - protein, 125 aa, Artificial Sequence
  CD112 v28 IgV
QDVRVQVLPEVRGQLGGTVELPCHLLPPVPGLHISLVTWQRPDAPAKHQNVAALHPKMGPSFPSPKPGSERLSFVSAKQSTGQDTEAELQDATLALHGLTVEDEGNYTCEFVTFPKGSVRGMTWL

SEQ ID NO: 362 - protein, 125 aa, Artificial Sequence
  CD112 v29 IgV
QDVRVQVLPEVRGQLGGTVELPCHLLPPVPGLHISLVTWQRPDAPANHQNVAAFHPKMGPSFPSPKPGSERLSFVSAKQSTGQDTEAELQDATLALHGLTVEDEGNYTCEFVTFPKGSVRGMTWL

SEQ ID NO: 363 - protein, 125 aa, Artificial Sequence
  CD112 v30 IgV
QDVRVQVLPEVRGQLGGTVELPCHLLPPVPGLYISLVTWQRPDAPANHQNVAAFHPKMGPSFPSPKPGSERLSFVSAKQSTGQDTEAELQDATLVLHGLTVEDEGNYTCEFVTFPKGSVRGMTWL

SEQ ID NO: 364 - protein, 125 aa, Artificial Sequence
  CD112 v31 IgV
QDVRVQVLPEVWGQLGGTVELPCHLLPPVPGLYISLVTWQRPDAPANHQNVAAFHPKMGPSFPSPKPGSERLSFVSAKQSTGQDTEAELQDATLALHGLTVEDEGNYTCEFVTFPKGSVRGMTWL

SEQ ID NO: 365 - protein, 125 aa, Artificial Sequence
  CD112 v32 IgV
QDVRVQVLPEVWGQLGGTVELPCHLLSPVPGLYISLVTWQRPDAPANHQNVAAFHPKMGPSFPSPKPGSERLSFVSAKQSTGQDTEAELQDATLALHGLTVEDEGNYTCEFVTFPKGSVRGMTWL

SEQ ID NO: 366 - protein, 125 aa, Artificial Sequence
  CD112 v33 IgV
QDVRVQVLPEVRGQLGGTVELPCHLLPPVPGLHISLVTWQRPDAPANHQNMAAFHPKMGPSFPSPKPGSERLSFVSAKQSTGQDTEAELQDATLALHGLTVEDEGNYTCEFVTFPKGSVRGMTWL

SEQ ID NO: 367 - protein, 125 aa, Artificial Sequence
  CD112 v34 IgV
QDVRVQVLPEVRGQLGGTVELPCHLLPPVPGLHISLVTWQRPDAPANHQNVAAFHPKMGPSFPSPKPGSERLSFVSAKQSTGQDTEAELQDATLALHGLTVEDEGNYTCEFVTFPKGTVRGMTWL

SEQ ID NO: 368 - protein, 125 aa, Artificial Sequence
  CD112 v35 IgV
QDVRVQVLPEVRGQLGGTVELPCHLLPPVPGLHISLVTWQRPDAPANHQNVAAFHPKMGPSFPSPKPGSERLSFVSAKQSTGQDTEAELQDATLALHGLTAEDEGNYTCEFVTFSKGSVRGMTWL

SEQ ID NO: 369 - protein, 125 aa, Artificial Sequence
  CD112 v36 IgV
QDVRVQVLPEVRGQLGGTVELPCRLLPPVPGLYISLVNWQRPGAPANHQNVAAFHPKMGPSFPSPKPGSERLSFVSAKQSTGQDTEAELQDATLALHGLTVEDEGNYTCEFVTFPKGSVRGMTWL

SEQ ID NO: 370 - protein, 125 aa, Artificial Sequence
  CD112 v37 IgV
QDVRVQVLPEVRGQLGGTVELPCHLLPPVPGLYISLVTWQRPDAPANHQNVAAFHPKMGPSFPSPKPGSERLSFVSAKQSTGQDTEAELQDATLALHGLTVEDEGNYTCEFVTFPKGSVRGMTWL

SEQ ID NO: 371 - protein, 125 aa, Artificial Sequence
  CD112 v38 IgV
QDVRVQVLPEVRGQLGGTVELPCHLLAPVPGLYISLVTWQRPDAPANHQNVAAFHPKMGPSFPSPKPGSERLSFVSAKQSTGQDTEAELQDATLALHGLTVEDEGNYTCEFVTFPKGSVRGMTWL

SEQ ID NO: 372 - protein, 125 aa, Artificial Sequence
  CD112 v39 IgV
QDVRVQVLPEVRGQLGGTVELPCHLLPPVPGLYISLVTWQRPDAPANHQNVAAFHPKMGPSFPSPKPGSERLSFVSAKQSTGQDTEAELQDATLALHGLTVEDEGNYTCEFVTFPKGTVRGMTWL

SEQ ID NO: 373 - protein, 125 aa, Artificial Sequence
  CD112 v40 IgV
QDVRVQVLPEVWGQLGGTVELPCHLLPPVPGLYISLVTWQRPDAPANHQNVAAFHPKMGPSFPSPKPGSERLSFVSAKQSTGQDTEAELQDATLALHGLTVEDEGNYTCEFVTFPKGSVRGITWL

SEQ ID NO: 374 - protein, 125 aa, Artificial Sequence
  CD112 v41 IgV
QDVRVQVLPEVRGQLGGTVELPCHLLPPVPGLYISLVTWQRPDAPANHQNVAAFHPKMGPSFPSPKPGSERLSFVSAKQSTGKDTEAELQDATLALHGLTVEDEGYYTCEFVTFPKGSVRGMTWL

SEQ ID NO: 375 - protein, 125 aa, Artificial Sequence
  CD112 v42 IgV
QDVRVQVLPEVWGQLGGTVELPCHLLSPVPGLYISLVTWQRPDAPANHQNVAAFHPKMGPSFPSPKPGSERLSFVSAKQSTGQDTEAELQDATLALHGLTVEDEGNYTCEFVTFPKGTVRGMTWL

SEQ ID NO: 376 - protein, 125 aa, Artificial Sequence
  CD112 v43 IgV
QDVRVQVLPEVRGQLGGTVELPCHLLPSVPGLHISLVTWQRPDAPANHQNVAAFHPKMGPSFPSPKPGSERLSFVSAKQSTGQDTEAELQDATLALHGLTVEDEGNYTCEFVTFPKGSVRGMTWL

SEQ ID NO: 377 - protein, 125 aa, Artificial Sequence
  CD112 v44 IgV
QDVRVQVLPEVRGQLGGTVELPCHLLSPVPGLYISLVTWQRPDAPANHQNVAAFHPKMGPSFPSPKPGSERLSFVSAKQSTGQDTEAELRDATLALHGLTVEDEGNYTCEFVTFPKGSVRGMTWL

SEQ ID NO: 378 - protein, 125 aa, Artificial Sequence
  CD112 v45 IgV
QDVRVQVLPEVRGQVGGTVELPCHLLAPVPGLYISLVTWQRPDAPANHQNVAAFHPKMGPSFPSPKPGSERLSFVSAKQSTGQDTEAELQDATLALHGLTVEDEGNYTCEFVTFPKGTVRGMTWL

SEQ ID NO: 379 - protein, 125 aa, Artificial Sequence
  CD112 v46 IgV
QDVRVQVLPEVRGQLGGTVELPCHLLPPVPGLHISLVTWQRPDAPANHQNVAAFHPKMGPSFPSPKPGSERLSFVSAKQSTGQDTEAELQDATLALHGLTVEDEGYYICEFVTFPKGSVRGMTWL

SEQ ID NO: 380 - protein, 125 aa, Artificial Sequence
  CD112 v47 IgV
QDVRVQVLPEVRGQLGGTVELPCHLLPPVPGLHISLVTWQRPDAPANHQNVAAFHLKMGPSFPSPKPGSERLSFMSAKQSTGQDTEAELQDATLALHGLTMEDEGNYTCEFVTFPKGSVRGMTWL

SEQ ID NO: 381 - protein, 254 aa, Artificial Sequence
  CD80-TIP I67T/L70Q/A91G/T120S
VIHVTKEVKEVATLSCGHNVSVEELAQTRIYWQKEKKMVLTMMSGDMNIWPEYKNRTIFDITNNLSTVIQALRPSDEGTYECVVLKYEKDGFKREHLAEVTLSVKADFPTPSISDFEIPSSNIRRIICSTSGGFPEPHLSWLENGEELNAINTTVSQDPETELYAVSSKLDFNMTTNHSFMCLIKYGHLRVNQTFNWNTTKQEHFPDNLLPSWAITLISVNGIFVICCLTYCFAPRCRERRRNERLRRESVRPV

SEQ ID NO: 382 - DNA, 867 bp, Artificial Sequence
  CD80-TIP I67T/L70Q/A91G/T120S
atgggccacacacggaggcagggaacatcaccatccaagtgtccatacctcaatttctttcagctcttggtgctggctggtctttctcacttctgttcaggtgttatccacgtgaccaaggaagtgaaagaagtggcaacgctgtcctgtggtcacaatgtttctgttgaagagctggcacaaactcgcatctactggcaaaaggagaagaaaatggtgctgactatgatgtctggggacatgaatatatggcccgagtacaagaaccggaccatctttgatatcactaataacctctccacagtgatccaagctctgcgcccatctgacgagggcacatacgagtgtgttgttctgaagtatgaaaaagacggcttcaagcgggaacacctggctgaagtgacgttatcagtcaaagctgacttccctacacctagtatatctgactttgaaattccatcttctaatattagaaggataatttgctcaacctctggaggttttccagagcctcacctctcctggttggaaaatggagaagaattaaatgccatcaacacaacagtttcccaagatcctgaaactgagctctatgctgttagcagcaaactggatttcaatatgacaaccaaccacagcttcatgtgtctcatcaagtatggacatttaagagtgaatcagaccttcaactggaatacaaccaagcaagagcattttcctgataacctgctcccatcctgggccattaccttaatctcagtaaatggaatttttgtgatatgctgcctgacctactgctttgccccaagatgcagagagagaaggaggaatgagagattgagaagggaaagtgtacgccctgtataa

SEQ ID NO: 383 - protein, 284 aa, Artificial Sequence
  ICOSL-TIP N52H/I143T
DTQEKEVRAMVGSDVELSCACPEGSRFDLNDVYVYWQTSESKTVVTYHIPQHSSLENVDSRYRNRALMSPAGMLRGDFSLRLFNVTPQDEQKFHCLVLSQSLGFQEVLSVEVTLHVAANFSVPVVSAPHSPSQDELTFTCTSTNGYPRPNVYWINKTDNSLLDQALQNDTVFLNMRGLYDVVSVLRIARTPSVNIGCCIENVLLQQNLTVGSQTGNDIGERDKITENPVSTGEKNAATWSILAVLCLLVVVAVAIGWVCRDRCLQHSYAGAWAVSPETELTGHV

SEQ ID NO: 384 - DNA, 909 bp, Artificial Sequence
  ICOSL-TIP N52H/I143T
atgcggctgggcagtcctggactgctcttcctgctcttcagcagccttcgagctgatactcaggagaaggaagtcagagcgatggtaggcagcgacgtggagctcagctgcgcttgccctgaaggaagccgttttgatttaaatgatgtttacgtatattggcaaaccagtgagtcgaaaaccgtggtgacctaccacatcccacagcacagctccttggaaaacgtggacagccgctaccggaaccgagccctgatgtcaccggccggcatgctgcggggcgacttctccctgcgcttgttcaacgtcaccccccaggacgagcagaagtttcactgcctggtgttgagccaatccctgggattccaggaggttttgagcgttgaggttacactgcatgtggcagcaaacttcagcgtgcccgtcgtcagcgccccccacagcccctcccaggatgagctcaccttcacgtgtacatccaccaacggctaccccaggcccaacgtgtactggatcaataagacggacaacagcctgctggaccaggctctgcagaatgacaccgtcttcttgaacatgcggggcttgtatgacgtggtcagcgtgctgaggatcgcacggacccccagcgtgaacattggctgctgcatagagaacgtgcttctgcagcagaacctgactgtcggcagccagacaggaaatgacatcggagagagagacaagatcacagagaatccagtcagtaccggcgagaaaaacgcggccacgtggagcatcctggctgtcctgtgcctgcttgtggtcgtggcggtggccataggctgggtgtgcagggaccgatgcctccaacacagctatgcaggtgcctgggctgtgagtccggagacagagctcactggccacgtttga

SEQ ID NO: 385 - protein, 248 aa, Artificial Sequence
  Anti-CD19 scFv
DIQMTQTTSSLSASLGDRVTISCRASQDISKYLNWYQQKPDGTVKLLIYHTSRLHSGVPSRFSGSGSGTDYSLTISNLEQEDIATYFCQQGNTLPYTFGGGTKLEITGSTSGSGKPGSGEGSTKGEVKLQESGPGLVAPSQSLSVTCTVSGVSLPDYGVSWIRQPPRKGLEWLGVIWGSETTYYNSALKSRLTIIKDNSKSQVFLKMNSLQTDDTAIYYCAKHYYYGGSYAMDYWGQGTSVTVSSAAA

SEQ ID NO: 386 - protein, 71 aa, Artificial Sequence
  CD8-derived hinge and transmembrane domain
KPTTTPAPRPPTPAPTIASQPLSLRPEASRPAAGGAVHTRGLDFASDIYIWAPLAGTCGVLLLSLVITLYC

SEQ ID NO: 387 - protein, 112 aa, Artificial Sequence
  CD3zeta intracellular signaling domain
RVKFSRSADAPAYQQGQNQLYNELNLGRREEYDVLDKRRGRDPEMGGKPRRKNPQEGLYNELQKDKMAEAYSEIGMKGERRRGKGHDGLYQGLSTATKDTYDALHMQALPPR

SEQ ID NO: 388 - DNA, 1356 bp, Artificial Sequence
  AntiCD19x8z chimeric antigen receptor
atggccttaccagtgaccgccttgctcctgccgctggccttgctgctccacgccgccaggccggacatccagatgacacagactacatcctccctgtctgcctctctgggagacagagtcaccatcagttgcagggcaagtcaggacattagtaaatatttaaattggtatcagcagaaaccagatggaactgttaaactcctgatctaccatacatcaagattacactcaggagtcccatcaaggttcagtggcagtgggtctggaacagattattctctcaccattagcaacctggagcaagaagatattgccacttacttttgccaacagggtaatacgcttccgtacacgttcggaggggggactaagttggaaataacaggctccacctctggatccggcaagcccggatctggcgagggatccaccaagggcgaggtgaaactgcaggagtcaggacctggcctggtggcgccctcacagagcctgtccgtcacatgcactgtctcaggggtctcattacccgactatggtgtaagctggattcgccagcctccacgaaagggtctggagtggctgggagtaatatggggtagtgaaaccacatactataattcagctctcaaatccagactgaccatcatcaaggacaactccaagagccaagttttcttaaaaatgaacagtctgcaaactgatgacacagccatttactactgtgccaaacattattactacggtggtagctatgctatggactactggggtcaaggaacctcagtcaccgtctcctcagcggccgcaaagcccaccacgacgccagcgccgcgaccaccaacaccggcgcccaccatcgcgtcgcagcccctgtccctgcgcccagaggcgagccggccagcggcggggggcgcagtgcacacgagggggctggacttcgccagtgatatctacatctgggcgcccctggccgggacttgtggggtccttctcctgtcactggttatcaccctttactgcagagtgaagttcagcaggagcgcagacgcccccgcgtaccagcagggccagaaccagctctataacgagctcaatctaggacgaagagaggagtacgatgttttggacaagagacgtggccgggaccctgagatggggggaaagccgagaaggaagaaccctcaggaaggcctgtacaatgaactgcagaaagataagatggcggaggcctacagtgagattgggatgaaaggcgagcgccggaggggcaaggggcacgatggcctttaccagggtctcagtacagccaccaaggacacctacgacgcccttcacatgcaggccctgccccctcgc

SEQ ID NO: 389 - DNA, 63 bp, Artificial Sequence
  T2A
ggcagtggcgagggcagaggaagtctgctaacatgcggtgacgtcgaggagaatcctggccca

SEQ ID NO: 390 - protein, 21 aa, Artificial Sequence
  T2A
GSGEGRGSLLTCGDVEENPGP

SEQ ID NO: 391 - DNA, 867 bp, Homo sapiens
  misc_feature: CD80
atgggccacacacggaggcagggaacatcaccatccaagtgtccatacctcaatttctttcagctcttggtgctggctggtctttctcacttctgttcaggtgttatccacgtgaccaaggaagtgaaagaagtggcaacgctgtcctgtggtcacaatgtttctgttgaagagctggcacaaactcgcatctactggcaaaaggagaagaaaatggtgctgactatgatgtctggggacatgaatatatggcccgagtacaagaaccggaccatctttgatatcactaataacctctccattgtgatcctggctctgcgcccatctgacgagggcacatacgagtgtgttgttctgaagtatgaaaaagacgctttcaagcgggaacacctggctgaagtgacgttatcagtcaaagctgacttccctacacctagtatatctgactttgaaattccaacttctaatattagaaggataatttgctcaacctctggaggttttccagagcctcacctctcctggttggaaaatggagaagaattaaatgccatcaacacaacagtttcccaagatcctgaaactgagctctatgctgttagcagcaaactggatttcaatatgacaaccaaccacagcttcatgtgtctcatcaagtatggacatttaagagtgaatcagaccttcaactggaatacaaccaagcaagagcattttcctgataacctgctcccatcctgggccattaccttaatctcagtaaatggaatttttgtgatatgctgcctgacctactgctttgccccaagatgcagagagagaaggaggaatgagagattgagaagggaaagtgtacgccctgtataa

SEQ ID NO: 392 - DNA, 909 bp, Homo sapiens
  misc_feature: ICOSL
atgcggctgggcagtcctggactgctcttcctgctcttcagcagccttcgagctgatactcaggagaaggaagtcagagcgatggtaggcagcgacgtggagctcagctgcgcttgccctgaaggaagccgttttgatttaaatgatgtttacgtatattggcaaaccagtgagtcgaaaaccgtggtgacctaccacatcccacagaacagctccttggaaaacgtggacagccgctaccggaaccgagccctgatgtcaccggccggcatgctgcggggcgacttctccctgcgcttgttcaacgtcaccccccaggacgagcagaagtttcactgcctggtgttgagccaatccctgggattccaggaggttttgagcgttgaggttacactgcatgtggcagcaaacttcagcgtgcccgtcgtcagcgccccccacagcccctcccaggatgagctcaccttcacgtgtacatccataaacggctaccccaggcccaacgtgtactggatcaataagacggacaacagcctgctggaccaggctctgcagaatgacaccgtcttcttgaacatgcggggcttgtatgacgtggtcagcgtgctgaggatcgcacggacccccagcgtgaacattggctgctgcatagagaacgtgcttctgcagcagaacctgactgtcggcagccagacaggaaatgacatcggagagagagacaagatcacagagaatccagtcagtaccggcgagaaaaacgcggccacgtggagcatcctggctgtcctgtgcctgcttgtggtcgtggcggtggccataggctgggtgtgcagggaccgatgcctccaacacagctatgcaggtgcctgggctgtgagtccggagacagagctcactggccacgtttga

SEQ ID NO: 393 - protein, 254 aa, Homo sapiens
  MISC_FEATURE: Mature CD80(B7-1)
VIHVTKEVKEVATLSCGHNVSVEELAQTRIYWQKEKKMVLTMMSGDMNIWPEYKNRTIFDITNNLSIVILALRPSDEGTYECVVLKYEKDAFKREHLAEVTLSVKADFPTPSISDFEIPTSNIRRIICSTSGGFPEPHLSWLENGEELNAINTTVSQDPETELYAVSSKLDFNMTTNHSFMCLIKYGHLRVNQTFNWNTTKQEHFPDNLLPSWAITLISVNGIFVICCLTYCFAPRCRERRRNERLRRESVRPV

SEQ ID NO: 394 - protein, 306 aa, Homo sapiens
  MISC_FEATURE: Mature CD86(B7-2)
APLKIQAYFNETADLPCQFANSQNQSLSELVVFWQDQENLVLNEVYLGKEKFDSVHSKYMGRTSFDSDSWTLRLHNLQIKDKGLYQCIIHHKKPTGMIRIHQMNSELSVLANFSQPEIVPISNITENVYINLTCSSIHGYPEPKKMSVLLRTKNSTIEYDGVMQKSQDNVTELYDVSISLSVSFPDVTSNMTIFCILETDKTRLLSSPFSIELEDPQPPPDHIPWITAVLPTVIICVMVFCLILWKWKKKKRPRNSYKCGTNTMEREESEQTKKREKIHIPERSDEAQRVFKSSKTSSCDKSDTCF

SEQ ID NO: 395 - protein, 272 aa, Homo sapiens
  MISC_FEATURE: Mature CD274 (PD-L1, B7-H1)
FTVTVPKDLYVVEYGSNMTIECKFPVEKQLDLAALIVYWEMEDKNIIQFVHGEEDLKVQHSSYRQRARLLKDQLSLGNAALQITDVKLQDAGVYRCMISYGGADYKRITVKVNAPYNKINQRILVVDPVTSEHELTCQAEGYPKAEVIWTSSDHQVLSGKTTTTNSKREEKLFNVTSTLRINTTTNEIFYCTFRRLDPEENHTAELVIPELPLAHPPNERTHLVILGAILLCLGVALTFIFRLRKGRMMDVKKCGIQDTNSKKQSDTHLEET

SEQ ID NO: 396 - protein, 254 aa, Homo sapiens
  MISC_FEATURE: Mature PDCD1LG2(PD-L2, CD273)
LFTVTVPKELYIIEHGSNVTLECNFDTGSHVNLGAITASLQKVENDTSPHRERATLLEEQLPLGKASFHIPQVQVRDEGQYQCIIIYGVAWDYKYLTLKVKASYRKINTHILKVPETDEVELTCQATGYPLAEVSWPNVSVPANTSHSRTPEGLYQVTSVLRLKPPPGRNFSCVFWNTHVRELTLASIDLQSQMEPRTHPTWLLHIFIPFCIIAFIFIATVIALRKQLCQKLYSSKDTTKRPVTTTKREVNSAI

SEQ ID NO: 397 - protein, 284 aa, Homo sapiens
  MISC_FEATURE: Mature ICOSLG(B7RP1, CD275, ICOSL, B7-H2)
DTQEKEVRAMVGSDVELSCACPEGSRFDLNDVYVYWQTSESKTVVTYHIPQNSSLENVDSRYRNRALMSPAGMLRGDFSLRLFNVTPQDEQKFHCLVLSQSLGFQEVLSVEVTLHVAANFSVPVVSAPHSPSQDELTFTCTSINGYPRPNVYWINKTDNSLLDQALQNDTVFLNMRGLYDVVSVLRIARTPSVNIGCCIENVLLQQNLTVGSQTGNDIGERDKITENPVSTGEKNAATWSILAVLCLLVVVAVAIGWVCRDRCLQHSYAGAWAVSPETELTGHV

SEQ ID NO: 398 - protein, 506 aa, Homo sapiens
  MISC_FEATURE: Mature CD276(B7-H3)
LEVQVPEDPVVALVGTDATLCCSFSPEPGFSLAQLNLIWQLTDTKQLVHSFAEGQDQGSAYANRTALFPDLLAQGNASLRLQRVRVADEGSFTCFVSIRDFGSAAVSLQVAAPYSKPSMTLEPNKDLRPGDTVTITCSSYQGYPEAEVFWQDGQGVPLTGNVTTSQMANEQGLFDVHSILRVVLGANGTYSCLVRNPVLQQDAHSSVTITPQRSPTGAVEVQVPEDPVVALVGTDATLRCSFSPEPGFSLAQLNLIWQLTDTKQLVHSFTEGRDQGSAYANRTALFPDLLAQGNASLRLQRVRVADEGSFTCFVSIRDFGSAAVSLQVAAPYSKPSMTLEPNKDLRPGDTVTITCSSYRGYPEAEVFWQDGQGVPLTGNVTTSQMANEQGLFDVHSVLRVVLGANGTYSCLVRNPVLQQDAHGSVTITGQPMTFPPEALWVTVGLSVCLIALLVALAFVCWRKIKQSCEEENAGAEDQDGEGEGSKTALQPLKHSDSKEDDGQEIA

SEQ ID NO: 399 - protein, 258 aa, Homo sapiens
  MISC_FEATURE: Mature VTCN1(B7-H4)
LIIGFGISGRHSITVTTVASAGNIGEDGILSCTFEPDIKLSDIVIQWLKEGVLGLVHEFKEGKDELSEQDEMFRGRTAVFADQVIVGNASLRLKNVQLTDAGTYKCYIITSKGKGNANLEYKTGAFSMPEVNVDYNASSETLRCEAPRWFPQPTVVWASQVDQGANFSEVSNTSFELNSENVTMKVVSVLYNVTINNTYSCMIENDIAKATGDIKVTESEIKRRSHLQLLNSKASLCVSSFFAISWALLPLSPYLMLK

SEQ ID NO: 400 - protein, 202 aa, Homo sapiens
  MISC_FEATURE: Mature CD28
NKILVKQSPMLVAYDNAVNLSCKYSYNLFSREFRASLHKGLDSAVEVCVVYGNYSQQLQVYSKTGFNCDGKLGNESVTFYLQNLYVNQTDIYFCKIEVMYPPPYLDNEKSNGTIIHVKGKHLCPSPLFPGPSKPFWVLVVVGGVLACYSLLVTVAFIIFWVRSKRSRLLHSDYMNMTPRRPGPTRKHYQPYAPPRDFAAYRS

SEQ ID NO: 401 - protein, 188 aa, Homo sapiens
  MISC_FEATURE: Mature CTLA4
KAMHVAQPAVVLASSRGIASFVCEYASPGKATEVRVTVLRQADSQVTEVCAATYMMGNELTFLDDSICTGTSSGNQVNLTIQGLRAMDTGLYICKVELMYPPPYYLGIGNGTQIYVIDPEPCPDSDFLLWILAAVSSGLFFYSFLLTAVSLSKMLKKRSPLTTGVYVKMPPTEPECEKQFQPYFIPIN

SEQ ID NO: 402 - protein, 268 aa, Homo sapiens
  MISC_FEATURE: Mature PDCD1(PD-1)
PGWFLDSPDRPWNPPTFSPALLVVTEGDNATFTCSFSNTSESFVLNWYRMSPSNQTDKLAAFPEDRSQPGQDCRFRVTQLPNGRDFHMSVVRARRNDSGTYLCGAISLAPKAQIKESLRAELRVTERRAEVPTAHPSPSPRPAGQFQTLVVGVVGGLLGSLVLLVWVLAVICSRAARGTIGARRTGQPLKEDPSAVPVFSVDYGELDFQWREKTPEPPVPCVPEQTEYATIVFPSGMGTSSPARRGSADGPRSAQPLRPEDGHCSWPL

SEQ ID NO: 403 - protein, 179 aa, Homo sapiens
  MISC_FEATURE: Mature ICOS
EINGSANYEMFIFHNGGVQILCKYPDIVQQFKMQLLKGGQILCDLTKTKGSGNTVSIKSLKFCHSQLSNNSVSFFLYNLDHSHANYYFCNLSIFDPPPFKVTLTGGYLHIYESQLCCQLKFWLPIGCAAFVVVCILGCILICWLTKKKYSSSVHDPNGEYMFMRAVNTAKKSRLTDVTL

SEQ ID NO: 404 - protein, 259 aa, Homo sapiens
  MISC_FEATURE: Mature BTLA(CD272)
KESCDVQLYIKRQSEHSILAGDPFELECPVKYCANRPHVTWCKLNGTTCVKLEDRQTSWKEEKNISFFILHFEPVLPNDNGSYRCSANFQSNLIESHSTTLYVTDVKSASERPSKDEMASRPWLLYRLLPLGGLPLLITTCFCLFCCLRRHQGKQNELSDTAGREINLVDAHLKSEQTEASTRQNSQVLLSETGIYDNDPDLCFRMQEGSEVYSNPCLEENKPGIVYASLNHSVIGPNSRLARNVKEAPTEYASICVRS

SEQ ID NO: 405 - protein, 433 aa, Homo sapiens
  MISC_FEATURE: Mature CD4
KKVVLGKKGDTVELTCTASQKKSIQFHWKNSNQIKILGNQGSFLTKGPSKLNDRADSRRSLWDQGNFPLIIKNLKIEDSDTYICEVEDQKEEVQLLVFGLTANSDTHLLQGQSLTLTLESPPGSSPSVQCRSPRGKNIQGGKTLSVSQLELQDSGTWTCTVLQNQKKVEFKIDIVVLAFQKASSIVYKKEGEQVEFSFPLAFTVEKLTGSGELWWQAERASSSKSWITFDLKNKEVSVKRVTQDPKLQMGKKLPLHLTLPQALPQYAGSGNLTLALEAKTGKLHQEVNLVVMRATQLQKNLTCEVWGPTSPKLMLSLKLENKEAKVSKREKAVWVLNPEAGMWQCLLSDSGQVLLESNIKVLPTWSTPVQPMALIVLGGVAGLLLFIGLGIFFCVRCRHRRRQAERMSQIKRLLSEKKTCQCPHRFQKTCSPI

SEQ ID NO: 406 - protein, 214 aa, Homo sapiens
  MISC_FEATURE: Mature CD8A(CD8-alpha)
SQFRVSPLDRTWNLGETVELKCQVLLSNPTSGCSWLFQPRGAAASPTFLLYLSQNKPKAAEGLDTQRFSGKRLGDTFVLTLSDFRRENEGYYFCSALSNSIMYFSHFVPVFLPAKPTTTPAPRPPTPAPTIASQPLSLRPEACRPAAGGAVHTRGLDFACDIYIWAPLAGTCGVLLLSLVITLYCNHRNRRRVCKCPRPVVKSGDKPSLSARYV

SEQ ID NO: 407 - protein, 189 aa, Homo sapiens
  MISC_FEATURE: Mature CD8B(CD8-beta)
LQQTPAYIKVQTNKMVMLSCEAKISLSNMRIYWLRQRQAPSSDSHHEFLALWDSAKGTIHGEEVEQEKIAVFRDASRFILNLTSVKPEDSGIYFCMIVGSPELTFGKGTQLSVVDFLPTTAQPTKKSTLKKRVCRLPRPETQKGPLCSPITLGLLVAGVLVLLVSLGVAIHLCCRRRRARLRFMKQFYK

SEQ ID NO: 408 - protein, 497 aa, Homo sapiens
  MISC_FEATURE: Mature LAG3
VPVVWAQEGAPAQLPCSPTIPLQDLSLLRRAGVTWQHQPDSGPPAAAPGHPLAPGPHPAAPSSWGPRPRRYTVLSVGPGGLRSGRLPLQPRVQLDERGRQRGDFSLWLRPARRADAGEYRAAVHLRDRALSCRLRLRLGQASMTASPPGSLRASDWVILNCSFSRPDRPASVHWFRNRGQGRVPVRESPHHHLAESFLFLPQVSPMDSGPWGCILTYRDGFNVSIMYNLTVLGLEPPTPLTVYAGAGSRVGLPCRLPAGVGTRSFLTAKWTPPGGGPDLLVTGDNGDFTLRLEDVSQAQAGTYTCHIHLQEQQLNATVTLAIITVTPKSFGSPGSLGKLLCEVTPVSGQERFVWSSLDTPSQRSFSGPWLEAQEAQLLSQPWQCQLYQGERLLGAAVYFTELSSPGAQRSGRAPGALPAGHLLLFLILGVLSLLLLVTGAFGFHLWRRQWRPRRFSALEQGIHPPQAQSKIEELEQEPEPEPEPEPEPEPEPEPEQL

SEQ ID NO: 409 - protein, 280 aa, Homo sapiens
  MISC_FEATURE: Mature HAVCR2(TIM-3)
SEVEYRAEVGQNAYLPCFYTPAAPGNLVPVCWGKGACPVFECGNVVLRTDERDVNYWTSRYWLNGDFRKGDVSLTIENVTLADSGIYCCRIQIPGIMNDEKFNLKLVIKPAKVTPAPTRQRDFTAAFPRMLTTRGHGPAETQTLGSLPDINLTQISTLANELRDSRLANDLRDSGATIRIGIYIGAGICAGLALALIFGALIFKWYSHSKEKIQNLSLISLANLPPSGLANAVAEGIRSEENIYTIEENVYEVEEPNEYYCYVSSRQQPSQPLGCRFAMP

SEQ ID NO: 410 - protein, 492 aa, Homo sapiens
  MISC_FEATURE: Mature CEACAM1
QLTTESMPFNVAEGKEVLLLVHNLPQQLFGYSWYKGERVDGNRQIVGYAIGTQQATPGPANSGRETIYPNASLLIQNVTQNDTGFYTLQVIKSDLVNEEATGQFHVYPELPKPSISSNNSNPVEDKDAVAFTCEPETQDTTYLWWINNQSLPVSPRLQLSNGNRTLTLLSVTRNDTGPYECEIQNPVSANRSDPVTLNVTYGPDTPTISPSDTYYRPGANLSLSCYAASNPPAQYSWLINGTFQQSTQELFIPNITVNNSGSYTCHANNSVTGCNRTTVKTIIVTELSPVVAKPQIKASKTTVTGDKDSVNLTCSTNDTGISIRWFFKNQSLPSSERMKLSQGNTTLSINPVKREDAGTYWCEVFNPISKNQSDPIMLNVNYNALPQENGLSPGAIAGIVIGVVALVALIAVALACFLHFGKTGRASDQRDLTEHKPSVSNHTQDHSNDPPNKMNEVTYSTLNFEAQQPTQPTSASPSLTATEIIYSEVKKQ

SEQ ID NO: 411 - protein, 222 aa, Homo sapiens
  MISC_FEATURE: Mature TIGIT
MTGTIETTGNISAEKGGSIILQCHLSSTTAQVTQVNWEQQDQLLAICNADLGWHISPSFKDRVAPGPGLGLTLQSLTVNDTGEYFCIYHTYPDGTYTGRIFLEVLESSVAEHGARFQIPLLGAMAATLVVICTAVIVVVALTRKKKALRIHSVEGDLRRKSAGQEEWSPSAPSPPGSCVQAEAAPAGLCGEQRGEDCAELHDYFNVLSYRSLGNCSFFTETG

SEQ ID NO: 412 - protein, 397 aa, Homo sapiens
  MISC_FEATURE: Mature PVR(CD155)
WPPPGTGDVVVQAPTQVPGFLGDSVTLPCYLQVPNMEVTHVSQLTWARHGESGSMAVFHQTQGPSYSESKRLEFVAARLGAELRNASLRMFGLRVEDEGNYTCLFVTFPQGSRSVDIWLRVLAKPQNTAEVQKVQLTGEPVPMARCVSTGGRPPAQITWHSDLGGMPNTSQVPGFLSGTVTVTSLWILVPSSQVDGKNVTCKVEHESFEKPQLLTVNLTVYYPPEVSISGYDNNWYLGQNEATLTCDARSNPEPTGYNWSTTMGPLPPFAVAQGAQLLIRPVDKPINTTLICNVTNALGARQAELTVQVKEGPPSEHSGISRNAIIFLVLGILVFLILLGIGIYFYWSKCSREVLWHCHLCPSSTEHASASANGHVSYSAVSRENSSSQDPQTEGTR

SEQ ID NO: 413 - protein, 507 aa, Homo sapiens
  MISC_FEATURE: Mature PVRL2(CD112)
QDVRVQVLPEVRGQLGGTVELPCHLLPPVPGLYISLVTWQRPDAPANHQNVAAFHPKMGPSFPSPKPGSERLSFVSAKQSTGQDTEAELQDATLALHGLTVEDEGNYTCEFATFPKGSVRGMTWLRVIAKPKNQAEAQKVTFSQDPTTVALCISKEGRPPARISWLSSLDWEAKETQVSGTLAGTVTVTSRFTLVPSGRADGVTVTCKVEHESFEEPALIPVTLSVRYPPEVSISGYDDNWYLGRTDATLSCDVRSNPEPTGYDWSTTSGTFPTSAVAQGSQLVIHAVDSLFNTTFVCTVTNAVGMGRAEQVIFVRETPNTAGAGATGGIIGGIIAAIIATAVAATGILICRQQRKEQTLQGAEEDEDLEGPPSYKPPTPKAKLEAQEMPSQLFTLGASEHSPLKTPYFDAGASCTEQEMPRYHELPTLEERSGPLHPGATSLGSPIPVPPGPPAVEDVSLDLEDEEGEEEEEYLDKINPIYDALSYSSPSDSYQGKGFVMSRAMYV

SEQ ID NO: 414 - protein, 318 aa, Homo sapiens
  MISC_FEATURE: Mature CD226
EEVLWHTSVPFAENMSLECVYPSMGILTQVEWFKIGTQQDSIAIFSPTHGMVIRKPYAERVYFLNSTMASNNMTLFFRNASEDDVGYYSCSLYTYPQGTWQKVIQVVQSDSFEAAVPSNSHIVSEPGKNVTLTCQPQMTWPVQAVRWEKIQPRQIDLLTYCNLVHGRNFTSKFPRQIVSNCSHGRWSVIVIPDVTVSDSGLYRCYLQASAGENETFVMRLTVAEGKTDNQYTLFVAGGTVLLLLFVISITTIIVIFLNRRRRRERRDLFTESWDTQKAPNNYRSPISTSQPTNQSMDDTREDIYVNYPTFSRRPKTRV

SEQ ID NO: 415 - protein, 327 aa, Homo sapiens
  MISC_FEATURE: Mature CD2
KEITNALETWGALGQDINLDIPSFQMSDDIDDIKWEKTSDKKKIAQFRKEKETFKEKDTYKLFKNGTLKIKHLKTDDQDIYKVSIYDTKGKNVLEKIFDLKIQERVSKPKISWTCINTTLTCEVMNGTDPELNLYQDGKHLKLSQRVITHKWTTSLSAKFKCTAGNKVSKESSVEPVSCPEKGLDIYLIIGICGGGSLLMVFVALLVFYITKRKKQRSRRNDEELETRAHRVATEERGRKPHQIPASTPQNPATSQHPPPPPGHRSQAPSHRPPPPGHRVQHQPQKRPPAPSGTQVHQQKGPPLPRPRVQPKPPHGAAENSLSPSSN

SEQ ID NO: 416 - protein, 154 aa, Homo sapiens
  MISC_FEATURE: Mature CD160
INITSSASQEGTRLNLICTVWHKKEEAEGFVVFLCKDRSGDCSPETSLKQLRLKRDPGIDGVGEISSQLMFTISQVTPLHSGTYQCCARSQKSGIRLQGHFFSILFTETGNYTVTGLKQRQHLEFSHNEGTLSSGFLQEKVWVMLVTSLVALQA

SEQ ID NO: 417 - protein, 248 aa, Homo sapiens
  MISC_FEATURE: Mature CD200
QVQVVTQDEREQLYTPASLKCSLQNAQEALIVTWQKKKAVSPENMVTFSENHGVVIQPAYKDKINITQLGLQNSTITFWNITLEDEGCYMCLFNTFGFGKISGTACLTVYVQPIVSLHYKFSEDHLNITCSATARPAPMVFWKVPRSGIENSTVTLSHPNGTTSVTSILHIKDPKNQVGKEVICQVLHLGTVTDFKQTVNKGYWFSVPLLLSIVSLVILLVLISILLYWKRHRNQDRGELSQGVQKMT

SEQ ID NO: 418 - protein, 297 aa, Homo sapiens
  MISC_FEATURE: Mature CD200R1(CD200R)
MDEKQITQNYSKVLAEVNTSWPVKMATNAVLCCPPIALRNLIIITWEIILRGQPSCTKAYRKETNETKETNCTDERITWVSRPDQNSDLQIRPVAITHDGYYRCIMVTPDGNFHRGYHLQVLVTPEVTLFQNRNRTAVCKAVAGKPAAQISWIPEGDCATKQEYWSNGTVTVKSTCHWEVHNVSTVTCHVSHLTGNKSLYIELLPVPGAKKSAKLYIPYIILTIIILTIVGFIWLLKVNGCRKYKLNKTESTPVVEEDEMQPYASYTEKNNPLYDTTNKVKASEALQSEVDTDLHTL

SEQ ID NO: 419 - protein, 183 aa, Homo sapiens
  MISC_FEATURE: Mature NC R3 (NKp30)
LWVSQPPEIRTLEGSSAFLPCSFNASQGRLAIGSVTWFRDEVVPGKEVRNGTPEFRGRLAPLASSRFLHDHQAELHIRDVRGHDASIYVCRVEVLGLGVGTGNGTRLVVEKEHPQLGAGTVLLLRAGFYAVSFLSVAVGSTVYYQGKCLTWKGPRRQLPAVVPAPLPPPCGSSAHLLPPVPGG

What is claimed:

1. A transmembrane immunomodulatory protein (TIP) comprising:
(i) an ectodomain comprising at least one non-immunoglobulin affinity-modified immunoglobulin superfamily (IgSF) domain comprising one or more amino acid substitution(s) in a wild-type IgSF domain, wherein the at least one affinity-modified IgSF domain specifically binds at least one cell surface cognate binding partner of the wild-type IgSF domain; and
(ii) a transmembrane domain.

2. The transmembrane immunomodulatory protein of claim 1, wherein the at least one cell surface cognate binding partner is expressed on a mammalian cell.

3. The transmembrane immunomodulatory protein of claim 2, wherein the mammalian cell is an antigen presenting cell (APC), a tumor cell, or a lymphocyte, which optionally is a T-cell.

4. The transmembrane immunomodulatory protein of any of claims 1-3, wherein the mammalian cell is a mouse, rat, cynomolgus monkey, or human cell.

5. The transmembrane immunomodulatory protein of any of claims 1-4, wherein the at least one affinity modified IgSF domain has increased binding affinity to the at least one cell surface cognate binding partner compared with the reference wild-type IgSF domain.

6. The transmembrane immunomodulatory protein of any of claims 2-5, wherein specific binding of the transmembrane immunomodulatory protein comprising the at least one affinity-modified IgSF domain modulates immunological activity of the mammalian cell compared with the reference transmembrane domain comprising the wild-type IgSF domain.

7. The transmembrane immunomodulatory protein of any of claims 2-6, wherein specific binding of the transmembrane immunomodulatory protein comprising the at least one affinity-modified IgSF domain increases immunological activity of the mammalian cell compared with the reference transmembrane domain comprising the wild-type IgSF domain.

8. The transmembrane immunomodulatory protein of any of claims 2-6, wherein specific binding of the transmembrane immunomodulatory protein attenuates immunological activity of the mammalian cell compared with the reference transmembrane domain comprising the wild-type IgSF domain.

9. The transmembrane protein of any of claims 1-8, wherein the wild-type IgSF domain is from an IgSF family member of a family selected from Signal-Regulatory Protein (SIRP) Family, Triggering Receptor Expressed On Myeloid Cells Like (TREML) Family, Carcinoembryonic Antigen-related Cell Adhesion Molecule (CEACAM) Family, Sialic Acid Binding Ig-Like Lectin (SIGLEC) Family, Butyrophilin Family, B7 family, CD28 family, V-set and Immunoglobulin Domain Containing (VSIG) family, V-set transmembrane Domain (VSTM) family, Major Histocompatibility Complex (MHC) family, Signaling lymphocytic activation molecule (SLAM) family, Leukocyte immunoglobulin-like receptor (LIR), Nectin (Nec) family, Nectin-like (NECL) family, Poliovirus receptor related (PVR) family, Natural cytotoxicity triggering receptor (NCR) family, T cell immunoglobulin and mucin (TIM) family or Killer-cell immunoglobulin-like receptors (KIR) family.

10. The transmembrane immunomodulatory protein of any of claims 1-9, wherein the wild-type IgSF domain is from an IgSF member selected from CD80, CD86, PD-L1, PD-L2, ICOS Ligand, B7-H3, B7-H4, CD28, CTLA4, PD-1, ICOS, BTLA, CD4, CD8-alpha, CD8-beta, LAG3, TIM-3, CEACAM1, TIGIT, PVR, PVRL2, CD226, CD2, CD160, CD200, CD200R or Nkp30.

11. The transmembrane immunomodulatory protein of any of claims 1-10, wherein the wild-type IgSF domain is a human IgSF member.

12. The transmembrane immunomodulatory protein of any of claims 1-11, wherein the at least one affinity modified IgSF domain has at least 90% sequence identity to a wild-type IgSF domain or a specific binding fragment thereof contained in the sequence of amino acids set forth in any of SEQ ID NOS: 1-27.

13. The transmembrane immunomodulatory protein of any of claims 1-12, wherein the transmembrane immunomodulatory protein has at least 90% sequence identity to the amino acid sequence selected from any of SEQ ID NOS: 393-419.

14. The transmembrane immunomodulatory protein of any of claims 1-13, wherein the at least one cell surface cognate binding partner is a stimulatory receptor expressed on a T-cell and the at least one affinity-modified IgSF domain has increased binding affinity to the stimulatory receptor compared to the affinity of the wild-type IgSF domain.

15. The transmembrane immunomodulatory protein of claim 14, wherein binding of the affinity-modified IgSF domain to the stimulatory receptor increases immunological activity of the T-cell.

16. The transmembrane immunomodulatory protein of claim 14 or claim 15, wherein the stimulatory receptor is CD28, ICOS or CD226.

17. The transmembrane immunomodulatory protein of any one of claims 14-16, wherein the at least one affinity-modified IgSF domain is an affinity modified B7-1 IgSF domain and the stimulatory receptor is CD28.

18. The transmembrane immunomodulatory protein of any one of claims 14-16, wherein the at least one affinity-modified IgSF domain is an affinity modified ICOSL IgSF domain and the stimulatory receptor is ICOS.

19. The transmembrane immunomodulatory protein of any one of claims 14-16, wherein the affinity-modified IgSF domain is an affinity modified ICOSL IgSF domain and the stimulatory receptor is CD28.

20. The transmembrane immunomodulatory protein of any one of claims 14-16, 18 and 19, wherein the at least one affinity-modified IgSF domain is an affinity-modified ICOSL IgSF domain that has increased binding affinity to at least one of: ICOS and CD28.

21. The transmembrane immunomodulatory protein of any one of claims 14-16- and 18-20, wherein the affinity modified IgSF domain is an affinity modified ICOSL IgV IgSF domain with increased binding affinity to both ICOS and CD28.

22. The transmembrane immunomodulatory protein of any one of claims 17-21, wherein the affinity-modified IgSF domain does not substantially specifically bind to CTLA-4 or exhibits decreased binding affinity to CTLA-4 compared to the wild-type IgSF domain.

23. The transmembrane immunomodulatory protein of any of claims 1-22, wherein the at least one affinity-modified IgSF domain specifically binds to no more than one cell surface cognate binding partner.

24. The transmembrane immunomodulatory protein of any of claims 1-23, wherein the transmembrane immunomodulatory protein specifically binds to no more than one cell surface cognate binding partner.

25. The transmembrane immunomodulatory protein of any of claims 1-22, wherein the at least one affinity-modified domain specifically binds to at least two cell surface cognate binding partners.

26. The transmembrane immunomodulatory protein of claim 25, wherein:
the first cell surface cognate binding partner is a stimulatory receptor expressed on a T cell; and
the second cell surface cognate binding partner is an inhibitory ligand of an inhibitory receptor, wherein the inhibitory receptor is expressed on a T-cell.

27. The transmembrane immunomodulatory protein of claim 26, wherein binding of the affinity-modified domain to the inhibitory ligand competitively inhibits binding of the inhibitory ligand to the inhibitory receptor.

28. The transmembrane immunomodulatory protein of claim 26 or claim 27, wherein:
the inhibitory receptor is PD-1, CTLA-4, LAG-3, TIGIT, CD96, CD112R, BTLA, CD160 or TIM-3; or
the ligand of the inhibitory receptor is PD-L1, PD-L2, B7-1, B7-2, HVEM, MHC class II, PVR, CEACAM-1 or GAL9.

29. The transmembrane immunomodulatory protein of any one of claims 26-28, wherein the affinity modified IgSF domain is an affinity modified B7-1 domain and the stimulatory receptor is CD28.

30. The transmembrane immunomodulatory protein of claim 29, wherein the inhibitory ligand is PD-L1 and the inhibitory receptor is PD-1.

31. The transmembrane immunomodulatory protein of claim 29 or claim 30, wherein the affinity-modified IgSF domain exhibits decreased binding affinity to CTLA-4 compared to the wild-type IgSF domain for CTLA-4.

32. The transmembrane immunomodulatory protein of any one of claims 29-31, wherein the affinity-modified IgSF domain does not substantially specifically bind to CTLA-4.

33. The transmembrane immunomodulatory protein of any of claims 1-13, wherein the affinity modified IgSF domain is an affinity modified CD155 IgSF domain or an affinity modified CD112 IgSF domain and the stimulatory receptor is CD226.

34. The transmembrane immunomodulatory protein of claim 33, wherein the affinity-modified IgSF domain exhibits decreased binding affinity to TIGIT (T-cell immunoreceptor with Ig and ITIM domains) compared to the affinity of the wild-type IgSF domain.

35. The transmembrane immunomodulatory protein of any of claims 1-13, wherein the at least one affinity-modified IgSF domain specifically binds to a cell surface cognate binding partner that is a tumor specific antigen.

36. The transmembrane immunomodulatory protein of claim 35, wherein the tumor specific antigen is B7-H6.

37. The transmembrane immunomodulatory protein of claim 35 or claim 36, wherein the affinity-modified IgSF domain is an affinity modified Nkp30 IgSF domain.

38. The transmembrane immunomodulatory protein of any one of claims 1-37, wherein the at least one affinity-modified IgSF domain is a first affinity-modified IgSF domain and the ectodomain comprises a second affinity-modified IgSF domain.

39. The transmembrane immunomodulatory protein of claim 38, wherein the first and second affinity-modified IgSF domain are different.

40. The transmembrane immunomodulatory protein of claim 38 or claim 39, wherein the first affinity-modified IgSF domain and the second affinity-modified IgSF domain each comprise one or more amino acid different substitutions in the same wild-type IgSF domain.

41. The transmembrane immunomodulatory protein of claim 38 or claim 39, wherein the first affinity-modified IgSF domain and the second affinity-modified IgSF domain each comprise one or more amino acid substitutions in a different wild-type IgSF domain.

42. The transmembrane immunomodulatory protein of any of claims 1-41, wherein the transmembrane immunomodulatory protein further comprises an endodomain or cytoplasmic signaling domains.

43. The transmembrane immunomodulatory protein of claim 42, wherein the endodomain is the endodomain from the wild-type IgSF member comprising the wild-type IgSF domain or is a functionally active portion thereof.

44. The transmembrane immunomodulatory protein of claim 42, wherein the transmembrane immunomodulatory protein is a chimeric receptor, wherein the endodomain is not the endodomain from the wild-type IgSF member comprising the wild-type IgSF domain.

45. The transmembrane immunomodulatory protein of claim 42 or claim 44, wherein the endodomain comprises at least one ITAM (immunoreceptor tyrosine-based activation motif)-containing signaling domain.

46. The transmembrane immunomodulatory protein of any of claims 42, 44 and 45, wherein the endodomain comprises a CD3-zeta signaling domain.

47. The transmembrane immunomodulatory protein of claim 45 or claim 46, wherein the endodomain further comprises at least one of: a CD28 costimulatory domain, an ICOS signaling domain, an OX40 signaling domain, and a 41BB signaling domain.

48. The transmembrane immunomodulatory protein of any of claims 1-13, wherein the wild-type IgSF domain is from an IgSF member that is an inhibitory receptor comprising an ITIM signaling domain.

49. The transmembrane immunomodulatory protein of claim 48, wherein the inhibitory receptor is PD-1, CTLA-4, LAG3, TIGIT, TIM-3, or BTLA and the at least one affinity-modified IgSF domain is an affinity-modified IgSF domain of PD-1, CTLA-4, LAG3, TIGIT, TIM-3, or BTLA, respectively.

50. The transmembrane immunomodulatory protein of claim 48 or claim 49, wherein the inhibitory receptor is PD-1 and the at least one affinity-modified IgSF domain is an affinity-modified IgSF of PD-1.

51. The transmembrane immunomodulatory protein of any of claims 48-50, wherein the affinity-modified IgSF domain has increased binding affinity for a trans surface cognate binding partner compared to the wildtype IgSF domain, whereby the increased binding affinity competitively inhibits binding of the trans surface cognate binding partner to the inhibitory receptor.

52. The transmembrane immunomodulatory protein of any of claims 48-51, wherein the transmembrane immunomodulatory protein does not comprise an endodomain, ITIM or cytoplasmic signaling domains.

53. The transmembrane immunomodulatory protein of any of claims 1-52, wherein the affinity modified IgSF domain differs by no more than ten amino acid substitutions from the wildtype IgSF domain.

54. The transmembrane immunomodulatory protein of any of claims 1-53, wherein the affinity modified IgSF domain differs by no more than five amino acid substitutions from the wildtype IgSF domain.

55. The transmembrane immunomodulatory protein of any of claims 1-54, wherein the affinity-modified IgSF domain is or comprises an affinity modified IgV domain, affinity modified IgC1 domain or an affinity modified IgC2 domain or is a specific binding fragment thereof comprising the one or more amino acid substitutions.

56. The transmembrane immunomodulatory protein of any of claims 1-55, wherein the ectodomain further comprises one or more non-affinity modified IgSF domains.

57. The transmembrane immunomodulatory protein of claim 56, wherein the one or more non-affinity modified IgSF domains is from a wild-type IgSF member comprising the wild-type IgSF domain.

58. The transmembrane immunomodulatory protein of any of claims 1-57, wherein the transmembrane domain is the native transmembrane domain from the corresponding wild-type IgSF member.

59. The transmembrane immunomodulatory protein of any of claims 1-57, wherein the transmembrane domain is not the native transmembrane domain from the corresponding wild-type IgSF member.

60. The transmembrane immunomodulatory protein of claim 59, wherein the transmembrane protein is a transmembrane protein derived from CD8.

61. A recombinant nucleic acid encoding a transmembrane immunomodulatory proteins of any of claims 1-60.

62. A recombinant expression vector comprising the nucleic acid of claim 61.

63. A recombinant host cell comprising the expression vector of claim 62.

64. A recombinant host cell comprising the nucleic acid of claim 61.

65. The recombinant host cell of claim 63 or claim 64, wherein the host cell is a mammalian host cell.

66. The recombinant host cell of any of claims 63-65, wherein the mammalian host cell is a human host cell.

67. An engineered cell comprising the transmembrane immunomodulatory protein of any of claims 1-60.

68. The engineered cell of claim 67, wherein the cell is an immune cell.

69. The engineered cell of claim 67 or claim 68, wherein the cell is a lymphocyte.

70. The engineered cell of claim 69, wherein the lymphocyte is a T cell, a B cell or an NK cell.

71. The engineered cell of any of claims 67-70, wherein the cell is a T cell.

72. The engineered cell of claim 71, wherein the T cells is CD4+ or CD8+.

73. The engineered cell of claim 67 or claim 68, wherein the cell is an antigen presenting cell.

74. The engineered cell of any of claims 67-73, further comprising a chimeric antigen receptor (CAR) or an engineered T-cell receptor (TCR).

75. A pharmaceutical composition comprising the cell of any of claims 67-74 and a pharmaceutically acceptable carrier.

76. The pharmaceutical composition of claim 75 that is sterile.

77. A method of modulating an immune response in a mammalian subject, comprising administering a cell of any of claims 67-74 or a pharmaceutical composition of claim 75 or claim 76 to the subject.

78. The method of claim 76 or claim 77, wherein modulating the immune response treats a disease or disorder in the subject.

79. The method of any of claims 77-78, wherein the modulated immune response is increased.

80. The method of claim 78 or claim 79, wherein the disease or disorder is a tumor.

81. The method of any of claims 78-80, wherein the disease or disorder is a cancer.

82. The method of any of claims 78-81, wherein the disease or disorder is melanoma, lung cancer, bladder cancer, or a hematological malignancy.

83. The method of any of claims 77-78, wherein the modulated immune response is decreased.

84. The method of claim 78 or claim 83, wherein the disease or disorder is an inflammatory disease or condition.

85. The method of any of claims 78, 83 and 84, wherein the disease or condition is Crohn's disease, ulcerative colitis, multiple sclerosis, asthma, rheumatoid arthritis, or psoriasis.

86. The method of any of claims 77-85, wherein the subject is human.

87. The method of any of claims 77-86, wherein the cell is autologous to the subject.

88. The method of any of claims 77-87, wherein the cell is allogenic to the subject.
